United States Patent Application Publication US 2018/0265913 A1 - sequence listing, part 3

SEQ ID NO: 1 - DNA, 6725183 bp, Pseudomonas aeruginosa SCV20265 (residues 3,362,593-5,043,888 of 6,725,183)
tggggcgggacaaccaactgccgcgcaagctgttcggtgccctgcatcctcgctacaagaccccggccttcaacattctgctctgcggcattttcggctgcgcgggttttgccctgacgatcgccaccgcgacgtccctggtcaatttcggcgcgtttctcgccttcagcgcagtcaacctttgcgcgttgcggctctccttcgatacccgcctcggagacggggcgggcttgttgcgcggggtgctctgcccgctcgttggcctggtcacggccgggtggatgctggtcagcctggataaagacgcgctgatcatgggctgtagctggctgggcctgggggcggtctatctcgcttgccggaccagcttcttccgcaacccggtgcccgacgcgctggcgtagtgaccacccttctatcgaacgctctgacaacaaccacaaggccggcttcgagcctgcccttcaatggcgagaatcgatatgcaaaccaaacttctgatcaatggtgccctggtggccggcgaaggcgagagccacgcggtgtacaacccgtcccagggcaacgtcctggtgcgaattaccgaggccagcggtgcccaggtccatgccgcggtgcagagcgcggatgcggccttcgacgcctggtcgcaaacgccgcccaaggatcgcgcggccctgctgctcaagctcgccgagcgcatcgatgcccaggcgcacgtgttcgctcgcctggaggcggacaactgcggcaagcctttcaacgccgtgctgctggacgaactgcccgccgtatcggacgtgttccgtttcttcgccggcgccgtgcgctgcctgcagggctcggcggcgggagagtacgtcgcggggcatacctcgatgatccgccgcgacgcggtgggcgtggtcgcctccatcgcgccgtggaactatccgttgttgatggcagcgtggaaactcggcccggcattggccggcggcaacaccgtggtgctgaaaccgtcggagcacacgccgctgagtaccttgaaactgggcgagctgcttgccgagatcttccccgccggcgtggtcaacatcgtccacggtcgaggtgcctcggtgggtgagccgctgaccagccatgcccaggtgcgcatggtgtcgctgaccggctccatgcgcaccggcagccggatcatcgaaggtacggccgagagcgtgaaacgcatgcacatggagttggggggcaaggctcctgtactgatcttcgacgatgccgacatcgatgccgccgtcgaaggcatccgcgccttcggcttctacaacgccggccaggactgtaccgccgcgtgccgcctctatgtgcagaaaggggtctaccaggagttcgttcgcaagctcggcgaggccgtatccagcatccggtgcgggctgccggacgatccggcgaccgagatgggaccgctgatcaccaaggagcatctggagcgtgtcgaggggttcgtgaaccgggccagggagttgccgcacatcgaagtggtcaccggcggcaagcgcgccgagggtgccggcttcttcttcgagccgacggtcctggccggcgctacgcaggaggatgaggtggtgcgccgcgagatcttcggcccggtggtgaccgtctcgccgttcgaggatgaagcccaggcgctggcttgggcgaacgactccgattacggcctggcgtcttcggtatggaccgccgatgtggggcgcgctcatcgcctggccgcccgcctgcaatacggctgcacctgggtcaacacccacttcatgctggtcagcgaaatgccccacggcggggtcaagctgtccggctacggcaaggacctgtcgatgtacggcctggaagactacaccgtggtgcgccacgtgatgttcaagcactgaccgcccacaccccggactacccagatcatttttcaagaggtttgcatgaacaacatcgagacgttcgaaaggctcgagtccaacgtgcggatgtactgccgcgacttgcccctggtgttcgataccgcccaaggcagcaggatccgcggcgaagatggccgcgaatacctggacttcttcgccggcgccggcgccctgaactatggccacaacgacccgcgcatgcgcgatgcgctgatcgcgtatctgtcggccaacggcgtgacccacgccctcgacctgcacaccaccaccaagcgccagttcctggaagcgatcgagcgcgacctgttcaagccacgcggctgggactacaaggtccagttcaccggcccgaccggtgccgacgccgtcgaggcggcgttgaagctggcgcgcaaggcgaccgggcgtaccaaggtcgtatcgttctacggggcttaccacggcatgaccgccggcgccctggccgtcaccggcaaccgcactcgccgtggccccgggctttccaccgacgtggtgttcgtgccctacgaagacagcccctatggcgaattcgacagcattggcttcctcgagcgcctggccaacgaccagggcagcggctcggagctgccggcggcggtgatcgtcgagtcggtgcagatccaggccggcgtctacccggcttccaaccaatggctgcaacgcttgcgcaagtggaccaccgaccacggcgtgctgcttatctgcgacgagatccaggccggttgcggccgcaccggcgacttcttcggcttcgagcgctccggggtggtgccggacctgatcacctgcgccaaatcgatcggcggcttcggcctgccgatggcgatcgtgttgcttcgtgccgggctggatgtatggcaaccgggcgatcacatcggcaccttccgcggcaaccagttggcgttcctgaccgcccgcatcgcgctcagctattggcacgatgagcagttcctgaaattgctggccgacaactgcgcggccatggagcgcgcagttgccggctttgcggaaattccaggcgtcgcgtccgcgcgttgtcgcggcatgatcgccggcatcgatttcggccgcggcaacgtcgaggtcgccaaggacgcccagcagcgcgtgctgcaagcgggcgtgctggtcgaccgctgcggcccgaatggcgaaatcatcaagctgatgccaccgctgaacactccgaccgaccaactcgaagacggcctcagggccttcggcgaatcggtcgcggcagcgctgggagaatagctgccagggtcacccttcggcctgtgttgaagcgcaggccggagacctgttggacatcagccagaacaataatcaggagacctcgagcgtgcgtgaacacaatgatgaaagcttcgagttcgaagtgtccgtgatcgggctcggagccatgggaaccatcatggcccaagcgttgctcaggcaaggcaggcgcgtggcgatctggaaccgctcgcccggcaaggccgcggcgctcgtcgccgctggcgctcacctgtgcgagagcgccgaagccgcgctggctgcaagcccggccacgatcttcgtgctcctggacaaccaggcgacccacgaggtgctcgggatgccaggtgtgatgcaggcgctggccaaccgtacgatcgtcgattacacgaccaacgcccgggacgagggcctggcgcttcagagtctcgtcaaccgcgcgggcggccattacgtcaaagggatgatcgtggcctacccgcgcaacgttggtcgtcgcgaaagccacagcattcataccggtgatcctgaggccttcgaacggcatcgggcgctgcttgaggggcttgccggtcatacgacgttcctcccctgggacgaagcattggccttcgccaccgtgctccacgcgcatgcgtttgccgcgatggtggctttcttcgaggccgtgggggctggtgtccacttcggcctgccgccttcgaagaccgctcggctcatgctcgacacgtcgcgctttttcgtcgccgatgcactcgaggaagcggtccgtcggctggaagcgcaggatttcgcaggcgatcaggcgaggctcgatgtgcatgcccaggccttcgcccatatcgccggagccctgcacgcacaaggggcctggacgccggtcttcgacgcgctgtgccaggccgtgcaacgcgcggcagccatgggctatggcgaccaggacatcgtagccgtcacccgcctgttcgcccgcgaatgcgacaccgcaagcgcggcgggacagtgactgcgctgcgcttctaaggtcctcgtggatagcgcccgaagacaacaactataaaaaatcgctggagaatcatatgcgccgattcggttttctactggctgtccttgtactggtcatcttcctgagtgcactgttttcgaagccttccgtcgtcaaccgcgggacggctcagcgcatggagcactaccccaccgtcggtatcggagacatcttccgggggcactagccaggcctcgggcgacagacagcctcaaagcctgccatgcggtcgctgccacccgttcgacagcgaccgtgtgcgcctcagtggtctatggctccgctggcgccaaggccggtctggcctcgtacgtattggtcggcgaaggctgccctttccgccatggcccgcttggtccggtccaggcgggaaacgccatacgccaccaggaacgccaacggcatggagaacagcgcaggctgggtataggggaacagcggctcggcgaagtgcaacacatccacccacaccagcctggagaaaaccacgaagcccatggcgctgaacaacccgacgtagccaccggccaacgcgccacgggtggtcagccccgaccagaacatcgacaggaacagcaccgggaagttggccgaagcggcgatgccaaaggccagggcgaccatgaaggccacgttgatgttctcgaacacgatgcccagggctatcgccaccaagccaaggcccagggttgccagcttggttacccgcagctcctgcgcctcgctggccgcgcccttcatgatcacccgcgcatacaggtcatgggcgatggcggacgccccggccagggccaggcctgacaccacggccaggatggtagcgaaggtcacggcggagaggaagcccagcagcaggttgcctcccactgcctgggccaggtgcatgaccaccatgttgcccccgcccagcagcttgcctcccgcttccccgccctcgaagaaccggggctgctggctgacgatcacgatcgacgccaggcccagcaggaaaatgacattgaagaagtagccgatgaacccggtggcgtagagcaccgacttgcgcgcctcccgggcatcgccgacggtgaagaaacgcatcaggatgtgcggcagcccggcggtgccgaacaccagccccaggctcagcgatagcgcggtcaacgggtcggccagcaagccaccaggggccagcaggcgttcgcccagggcatggctatccatcgcctggctgaccagcctgtcatagctgaagtcgaattcgcgcatcgccaggaacagcaccagcgagccgccgaccagcagcaggaatgccttgacgatctgcacccaggtggttgccaccataccgccgaaggtcacatacagcatcatcagcgcaccgacgatcaccagggcgatctggtagtccaggccgaacagcagcctgatcaactgcccggccccgaccatctgcgccaccaggtagaaacacaccacggtcagcgatccgatggcggccatggtgcgcaccttgccctggtcgagacggtacgaggtgatgtcggcgaaggtgaagcggcccaggttgcgcagccgctcggtcatcaatagcagcagtaccggccagcccgcgaagaaggcgatgagatagatgtagccatccatcccggagctgtagatgagcgcggtgattcccagcagcgtggaggcggacatgtagtcgccggccagcgccaggccgttctgccagccccggataccgccaccggcgctatagaaatccgccgtcgaatgggtccgtcgcgccgcccaccaggtgatgcacagggtgaacagcacgaacaccatgaacatgccgatggcatgcaggttgagcggctggcgctggccagcgtccaacgcgggcgaggccaacagcaggccggagtgcagcgacaacgccaggggaaggagcttcttcatgcgccctgctcctcttccagcccagcgaccagagcctgggtcaggcgatcgaattcgccgttggcgcggtacacatagagcgccgacaaggcacagaaaaacacgaacaggaacacgccggccgcgacgccgaaggtcatgttcgagccctgcgccagacgcctggcaatcagctcggggcagaacgataccagcgcgatgtagccgtggaacgtggccaggatcagcaggagcaggctcagggtgaaacggtttcggcgcgccaccagttgctggaaccgggcactggcgcggatacgcgcgtatagcaggctggacatgggacacctcgggcaacctagttattgttatggaatgtgcgggtgcggcagcgccatcagcggccggcgtcgccggcctcctcctcctgccgggcccactcgcgcaggacgaacttctggatcttgccggtggcggtcttgggcagttcggtaagcgtcacatgccgcggtgccttgaagtgcgccaggcgctctcggcaccagcggaccagatcgtcacccgtggttctgggtaaggcatccgcccgcaaggcgacgaacgcgtggggtgtctcgccccagcgcgaatccgggcgcgccaccaccgcggcctcgaccacctcggggtgctggtagagcacttcctcgatctccagcgagctgatgttctcgccgccggaaatgatgatgtccttggcccggtccttgatttccacgtagccgtccgggtgcagcacggccaggtcgccggtgtgcaaccagccgtcggccaacgcggcacgggtggcctcggggttgtgcaggtagcctttcatcacggtgttgccccgcactaccagttcgccaagggtgcggccgtcggccgggaccggacggccggtgtcggtatccagcaccgtggcctcctcgagcatcgggtgggcgacgccctggcggctcatgaactgggcccgggcctccagcggcaattcgtcgacccccggctgccacaggcacagggtgctggggccgtagctttcggtcatgccgtaggcgtgggtgatgctgaagccgcgtgcttccatggcggcgatgaccgcgctgggcggcgcggcgccgccggtgatcaccgataccggcacggcagggacgctggcatgctcggcatggatcagcatcgacatcaccaccggcgcggcgctcaggtgggtcaccgcatgctcggcaatggcggcgtggatcgcatctggctggaccttgcgcaggcatacgtgcgtgccaccggacagcgtcaccgcccaggtatggctccagccgttgcagtggaacatcggcaaggtccacaggtagacgctgcgcggccccaactggaagatcagcgcgccggcgcaggcgttgaggtaggcgccgcggtgatgcaggaccacgcccttgggatcccccgtggtgccggaggtgtagttgatggcgatcgactgccattcgttctgcggcgcactcagcggccgccccgggtcgccctgggccagaaacgcctcatagtccaggtcgtgggcgaggtcggcgcgctcggcctgatcatcgtcgatgcccaccagcaagggcggcgcatcgagcatggccagcgcctgctgggccacggcaccgaactcacggtcgcagatcagcaccctggccgcacagtggcgcaggatgaaggcgatgctgcgtgcctccaggcggatgttgatgcataccagcaccgccccggcaccgggtacgccatagtgggcctcgagcatttccgggatattcggcgccagtatcgccacccgctcgcccgcttgtacgccgacccgctccagggcgctggccagggcgcaactgcgctcgtgcaactggcggtagctgtagcgccttgcgccatagaccaccgcatcgcgctgcgggtacacctgcgcggcacgcttgaggaacgacagcggcgacagcgggacatggttggcttcgttgggagcaagctcctgctcgagggtcggaaccatcatggcagccacctcatcgacacattgctcgggtcttgcacgcacatacatacctcctgttcttgttgttattgcgccagggcgcgttacaggctgctgcacaggtggccgccatcgaccacgatctcggcgccgctcatggcccgcccggcatcgctggcgagcagcagcaaggcgccgtccaggtccgccggcacgctgaagcggcggctggggatacgcgagcgcaacttgtcgccggcctcgctggccaggaaggcctcgttcaggtcggtcatcacgtagccgggcgccaaggcgttcacccggatgccatggcgcgccaactccagcgccatggcgcgggtcaggtgggccaggccggccttggccgccaggtaggggccgacggcgccggccacacggctggcgaggatcgaagtgacattgatcaggctgccgcccttccccgccgcgaccatgcgcctggcgctttcctgggccaccgcccaggcgcccttgaggttggtgtcgagcacgcggtcccagctttgatcgtcgcaggccagcaagggctggctgtcgctcacccccgcattgttgaccagcacatccagcgggccggcggcatcgagcacccggcagatatcctcacggcaggtcacatcgagggcaaaggcctgcgcctgccctcccgccacctcgatggcctccaccagtgcctgcagcggcgcctggcgcctggcagtcaccaccacctcggcgcctgcggcggccagggtcatggcgaagtggcggcccaggccgctggaggctccggtcaccagggcgcggcgcccgtcgagggcgaacagtcgggtcaggttcggctgcatcagcgggcctccaggcgctggtcgagcagtttcttcgccaggctcatgcggtgcacctcgctcgggccgtcatagatgcggaacgggcgaatgtcgcggaagatccgctccaccacggtgtctccggtcaccccgcgcccgcccagtacctggacgcaacgatcgaccacccgccacaacgcctcggcgctgatcaccttggccatgctggagtcgacattggcccgccggccctggtcgagcacccaggcacagtgccacaccgccaggcgcaccacgtgcaggtccatcatgttgtcggccagcatgaagcccacaccctggtgctcgcccagcggcttgccgaaggcgtcgcgggtgcgcgcatagtcgcaggcgatgtcgtgggcgcgacgcgcggcgcccagccagcgcatgcagtgggtgagccgcgccggcgccaggcgcacctgggcataccggaaccccttgccgatctcgccgagcacatcgctcgccggaatacgcaggttgtcgaaacgcagctgcccgtggccaccggtgaagcagctgtccagcgagtccagctgacgctcatggatgatgccgtcgcgtttcatgtcggtcaggaacatggtcgccgtaccatcctccatgcgcgccatgatgatgccgaagtcggcgccttctgcgccggtgatcagccacttgcggccattgatcaggtagtcgtcgccatcgcgggtggcggtggtgcgcagcatcgaggggtccgagccggagcctggcgcaggctcggtcatggcgaagcaggaacgggcatggccctggaccagcgggcgcaaccagcggtctttctgcgcctcggtggcgaccacgtccatcaggtggatgttgccttcgtccggggcatggatgttcagcgccaccgggcccagcggcgagtagccggcctcttcgaagacgatcgccttggccacgtggctcagcgccaggccacccatttcgcgactggcgtggggcgtcagcaagccggccgcgcgggcgcgggccaccaggtcctggcgcagggcgtcgctggggccgtggctgtcctggcgggggtcgttctcgagcgggatgacctgttcggcgatgaagtctcgggtcttggcctgcaaggcgagcagttcgtccgggagggtgaagttcatggttgtccttctgggtgcttgtctgtcgggaatgagatggctgacgccgttcagggcaaggccttgggattgctgatggccaatcgggcgagggtgacctggcgcaatgtctcgaccagggttctatggttttgcggggcgtcatggctgcccaggcgaatggcccgtgccagttggcggcgcaggtcgggcaaggctgcgggcgcctcgtcgaccaaggcggccagacgtgtccgctcctggtcctcggccagagcccccaggcggctttcgcgggctgcgatggccatggcattggcgatcatcagggccgggtaacgcagctcgccgggcagcgctggcagcagttgctccagaagcgtcgagcgagcgatgtcgagcagttcatgggcatcgggctgggtcatggcgcttcgcctccggtcatgtgcaggatgtcgagctcaagctccggcagcagtcgtgcggtcagtgccagctcaatggacggctcttcgccggacaggtggcgctggccttgctgcagggcgatcaccgcccagcgcagggtggccatgacctgccagtagtgcagttggctgcgctcgatacgcagcggagacacctcgtggtagccccccaggaagtcctccagttggccgataccgccggcctcgaggtctgggcgggtgaagcgccagcagcgggcggtgaaccagccgaggtcttcgcacgggtcgccccagccggtgaactcccagtcgagtacggcttcgagtccctgttcgctggccaggtagttgccggtgcggtagtcacggtgcaacagacacaggatgctgttgcgcggtgcgtgcagctcgcaccagcgcaggccccactccagcaccggataggcatcggcgagggtgtcgaggtagtggcgataggcgtcgatggtcgccaaggccggtgagcgggttggcatcggcaggaaatccagcgcggcgcacggcgggcgaacctgatgcaggcgcgccaggttggcgccaagctgcgccgccagctgcgcccggccctgggtgccggcgccagcgctgagcaagcgaccggcggcgacacccggcacgtactccatcaggaagaacacccgcccatgcacgcgcatatcgcggcacagccacagcgggcgcggtactttcacaccggcctgatgaaccacttgcagcaccgcgaactcctgttcgcggtcaaggctggcgggtagcgcggaaagcgcatcgctgcgcagcacccaacgccgggcgccagcccaggggccgccttcgatcagcaggtccagcagccagttttcctggatggcgccgccgctcaggcgctggcgtgcctggatgaccacccgcttcgctgcggcgtgctcgcggatgaactcgaccagtggctggtcgtccggggccacgaatgtctcgccgtcccgtacggtcgtaggaggagtgctcatggggttgtagggcctgcctgtagtcatgttgtcagacagctttagcaacgcctgggccaattttcgggatatgcctgtaacccgcgcgctctctggcgccaggtttttccatggcgctcgacgaagcaatccgggtttcacttttgcaacgaactgattcagtatcgaaacaattcaatcctgaacaggtctcgacatgcgtcctcccctttcccaggttgtcgtgctggtcagtcaccttcaacgacctcggcagcgcagtcgcctcgccagcctggtggccggcctggcggcgggctacccggacgtccatatcgaggtgcttgacacctcggtatccgaagccctgcaaaccgcccgcgatctcgaacagcgcggcaaggccgacgtgttcgtctgtgctggcgccactgccgcctacctgcgtagacacctggcacgtccggttctgacgatgcgtgttggcggcggagacctgttgcgtgcgctggagcaagctcgcgaacactcctcccatgtcgccctgctcagctacaaccgcatcgaccgggacctgcaagccatgcgaacgctgttcacggtgcaggttcaccaggtcgcctacaccaccctggaagaggctcgccaggctgtcctggaggtagcccggctgggttgccgcagcatcatcggttcgtcgacggtggtggagctggcggaacaggccggcctgcacggcgtgctgtcgctgagcgaagacactgcgcgcaaggcgctcgaggaggccatgggagtcctcgacagccagcgcctggagatcgccaagcggcggcatctggacgcggtgctgcaacacattccaagcggtgtggcagcggtcgacaaccagggtgtggtgcaatcgctcaaccctgcccttgcccagttgctggagttgccggtcagctcggctctggggcgaccgttacagcagctatgcccggagcttgacctgcagcaggcgctagaggatggcggtggcgaggaaaaccgggtgatccggctgggctcgcacgccgtggtcagcaatctcctgccgatcctggagaatggcgagcgtaccggcctggtgctcacctgccaggacatcaccgccgtgcagcgcgcggatcaacgcatccgctccactcgccgtccaggtgccttcaccgcgcgttaccggctcgaacaactcaacggcgcgagcaaggccaaccgtgagatgttgcagctggccaagcgctttgccgccagccattcgaccatcctgatcactggcgaaagcggcaccggcaaggaactgctcgcccaagggatccataacgagagccctcgccggcacgggcctttcgtcgccatcaactgcgcggcgtttcccgagtcgctactggaaagcgaactgttcggctacgaggaaggcgccttcagcggttcgcgcaaaggcggcaagcccggcctgttcgaggcggcgcaccgtggcacgctgttcctcgacgagatcggcgacatgcctgtgtcgctgcagactcgcctccttcgtgtattgcaggagcgagaggtcttgcgcctgggcggcaccgagccgatctccatcgacgtgcgcatcgtcgccgccacccacaaggacctgggggccgccatgaaggatcgcgagtttcgcaccgacctgtattaccggctgaatatcctgcgcttgcagaccactcccctgcgcgagcggcccgaggacattcctctgatttgccagggaatcagccagcgcctgctggtccagggccagccaccgggtgccgcaggcataacgacgctcctgctaccctacctcgtccgccattcctggcccggaaacgtcagggaactggagaatgtcatcgaacgggcgatgctctccgccagcgaaatcttccatgagcacggcgtggatgagcattacctggctcgcgtgctgcccgagctattcgaaggccagcctcagcccaggtcccggaaagagccatcgcgcacaaaggatttgcacgccatcggcaaaaccgcgcagttgcgctacatacaggagacgctggacagctgccagggcagccttgacgaggctgcgcgtcggctcgggatcagccggaccacgctgtggcggcggcttcgctcggcacgctgagcaaaacgatgcgcctgggcgatgcggaactcgcccaggcatggacgcggccggtgccgtgaaactcaattgatcagcggaacctgcttgccgatctgcaacgcctccagcgcgtccagctgcgcttcgatctgcaggaagcgcatggcccgccgaggtgacatcttctcggccacttcctgcacgtaccggtgcagcacggccagctgtttctcctgcaatccccgatagaggtcgaccatcctcgaagcttccgcgtcggtaatgctgccggaaccataggcgcgggcatattcgagcaggagctggaatgtctccttgtgcaggctgtccgtctcgcctcggtagcgtgaatagatcggccagaacgtctcggcttcggtgccgtccagcgccatgtttgcctcgaccatccgtttgcgcttgtagttgatggtttccagctggttcctgatcttttccttgtgctcgttcatcacctgctcgaccgatggcaggggttcgtcggcatgagcggcaagggaaagggtcgcgaccagggtggccacgaaaagcaagcgcctggacatcggcgttctccttctgggttgatcgaatggattcatgctgccgcggtgcgatgcgacatcaacgggccccgctcctcagggcgatcctgggcgcccactccagccattcgtcattggccgaatcgaacagggcgaaggtctgccccggcttggcgggctcgcccatctgcgcattgttcggggtggcgaaggcaatgccgccctccatcagcgcctccatcgactcggtgcgtagcgacaggcccttgaacaggctggcgtcgacgccgaagccgctggcattccagaaacggctgccggtacgcaccagcggtacgtagcgcggttcgatgaggatgctgatcagcacccggtcggcctgttcgcccaaggccaggtcgacgaccttgcccaccgggatctgccggtaggtcaccaggttgcccggcttgatcgagcccttgcgcggcgcgctgagggtcagccgcaggccgttttcccgccccagcaggttgggcgcttcggcgagagtctggaagcgtgcctggcgctcgcccggcgtgctcgacggcagcgcctcgatataggggccgctgaccagggttccgaggttctcggtacgcagcaggccgagcgccggacgcaccacccagaagcgggttccgctgcgggcgacgcgctcgccggcggaagtcaggcgggccttcatcagtatcccggagaggtccgggttcagctcgacgctttcgatcttgccgatgtccaggcccttgaagcggatcggcgtgccttcgcgcagtccatcggcattgtcgatgctcagttggatctccacgccacgggccatcgccgcctcctcgctgtcgaagagggtgaagcgacgcaccttggtcacggtcggcgccttcggatcgagggtgtcgaaggaaatcccgccggtgatcagggtctgtagcgactcgctcttcacctgcacgccgctgaggttgccggtcagggtgatcccgctggagttccagaagcgcgtcgaggtattcaccaggtgcgcgtactccggctcgatgtgcacacccaccaccactcgctggcggtcgcgcgacagctggtagctctgcacgctgccgacgcggacctggcggtagaggatcggcgcgccgatgtcgatcgagccgagcttgtcgctggtcagcaccaggtgcaggccgggcgcgtcggtgttcagcggcggcgctttcgggcggatggtgaactcgcgactcggcgcgccgctcttggcgaagcgcacgtcgatatagttacctttcaccagggcctcgaggccggtgatgccggccagggagatgcttggcttgacggtccagaactcggtgccttccagcagcatgtcctcgacccgcggatccatcgccaggtcggcagtggcgctgctgtagtccttgtccatgtcgatcgacttgaccaggccgacctgcacgccgttgaacatcaccggggtgcggcccggatcgatgccgctgacgtcgttcatcttcagcttcacgcgcagaccggcctgggccgcgtcgtagtcgtcgtacagacggaacggcttgctcggatcggtcggcgggctgtcgcctcgactatcggaagtagcgaaagcgatgccgccggccgccagggtcagcaacgattcgctacgcaccttgaagccggacaggccgccggaaatggagatgccgctggcgttccagaatcgcgtgtgcttgcgcaccaggtcggcgtaggccggctcgatgtgcaccttgatctcgatggtcctctggtcatcgcccaactggaagctcttcacttggccgacctggatctgccggtagaacaccgggctgccctgctccagggagcccaggcgatcggccttgagggtcaggtgcaggccgggcagcctgtcggaaagggggggcggctgcttcagcgcggtgaagttgcgttcttccttctcgcccttcaccggatcgaccgcgatgtagacgccggataccagggtttccaggccggtgacgccagccagggaaacccgcggcttgaccagccagaagcgggtacccttgctcaggtactggcgcgcctccttgtccatttcgatggtggccaccacgcccttgatatcttcgctgacatccagcgcgacgaccttgccgaccgcgatgcccttgtacagcacctcggtcttcttcgcctggatgccatcgctgctctcgaagcgcacctggatcagcacccctgcctggtcgtaggcgcgccagcccagccaggccccgatagccagggccaccagcggcagcacccagatcgccgaccagttcgaggtcttgtgtttcttcgggcttggcaaatcactcattctcgtcgtccagattggtgttgtcccagataagccgggggtcgaacgtcacggcggcgagcatggtgagcaccaccacgctggcgaaggcggcggcgccgagattggcctcgatgctcgccaggttgccgaaattgaccagcgccacgaggatggcgatgacgaagatatcgagcatcgaccagcgcccgacccattcgatgaagcggtacatcatgattcgctggcgggccgacatcggctggtgccgctgcaccgaatagagcagcagggcgatgccgaccagcttgaaggtggggacgacgatactggcgacgaacaccaccagggcgatgggaaacatgtcggcctggatcagggtcacgaccccgcccatgatggtcgccggggagcccttgccgagcatgttgacggtcatgatcggcaacaggttggcgggaacgtagagaatcatcgccgagatcagcaacgcccaggtacgggcaatgctgttcggccgccgaggatgcagcttcgcgccgcagcgactgcaacgcggatgctcgttcccgtcggcgcgattcaactggtggcactcgccgcagaccagaatgccggcatcgatcgcacgcattgtcgttctccaggatctctgccgggacggtgatggtttgtcgtcgtccagcgcggcggccaacctgtgccttgcccggcagggaatgggcacggggaaaccacctgtcgggggaagctgccgtcggaagacgattctgtccggggcgttacagcgatggcatgggttcggccactcacgcgcatcagttgtccgctcggctcgatctggccaggctgggccggactcgctattcatgccgcttggacgacgatcgagcgctgggatcgcatgatgcttatatagttcacatgagtcaatattgtctcatgtgtttttctccatcgcgctatacggagccaagcggcgatcctgccagggaggcatcatggcattcgccacggaaggaaggacccccggagagattgtggcgcgcctcctgtctcatgccgatgcaagtggcggtatcggccgagaatccctcgacaccgagaagcggcttttccgcgtccaggcatgggacgataggagcactcgggtagccctggatcgatactcgctttacaggcaggaacaccggcgggcctcttccggggctcctccagtgtcctgctgcacacctctgaggctccgatatcctccgaacctcgtctttgcccggttcctctttcagtcaatcgccgcccgcgtcccaaccccgtccaccaaccgcgcaatccccaatgggttgccatccttcagcgcttccggcagccacgcgtccgggtagttctggtagcacaccgggcgcaggaaacggtcgatggccagggtgcccaccgaggtgccgcgggcgtccgaagtggccgggtacgggccgccgtggaccatcgcgtcgcagacttccacgccggtcgggtagccgttgagcagcaggcgtcctgccttctgttccaggagcggtaccaggtcggcgaaggacgccaggtcttccgcttcggcgatcagggtcgcggtgagctgcccgtgcagcccatgcagcgcgcgcttcagttcggcgtggtcggcgacctcgacgaccacgctggccgggccgaagacttcttcctgcagcaactcgtcgccctccagcagcaggctgacgtccgcctggaacagttgcggccgggcctggcggccctcctgcagttgcccggcgagatggcggacgcgcgggtgggcgtgcagcgccgccaggcctctttcatagctggccagcgtgccggcgttgagcatggtctgcgccggctggtcgtccatgcgggcggcgaagcgttcgaggaacgccgagaattgcgcagagcggatgccgatgaccagcccgggattggtacagaactggccgcagccgagcaccaccgaggcactcagttcgtcggccacggcctcgccgcgcttcttcagcgccgccggcagcagcaccactgggttgatgctgctcatctcggcgaacaccgggatcggctgcgcccgggcggccgccatgtcgcagagggcgcggccgcccttcagcgaaccggtgaagccgaccgcctggatcgcggggtggcgtaccagccgctcccctactccgccgccgtagatcatgttgaacacgcccgccggcatgccggtgcgctcggccgcgcggaggatcgccgcggcgacccgttcggcggtggccatgtgtccgctgtgcgccttgaacaccaccgggcagccggcggccagggccgcggcggtatcgccgccggcggtggagaacgccagggggaagttgctcgcgccgaacaccgccaccgggccgaggccgatccggcactggcgcaggtcgacgcgtggcagcggcttgcgttcgggccgggcgcggtcgatgcgcgcgccatggaagtcgccgcgccgcaggacttcggcgaacaggcgcagctggccgctggtgcggctgcgttcgccctggatgcgcgtggccggtagcgcggtttcacggcagacgatggcgacgaaatcatcgtccagcgcgtcgagttcggcggcgatggtatcgaggaattccgcgcggcggctggccggcagttgccggtagtgcgggtaggcgctggcggcggcttcggcggcggcgtccacttcttccggggtggcttgcacgaagcggtacggcagcgcctcaccgctggcggcgtcgaggctttgcaggaagagcgtgccggccgcgctgcgggcgccgccgatgaagttgtgtccgaggatggctgtcatgtcgacctcatacaggggaagccccgccggggatggccggcggggttggagccaaggctccgcaggaatgaaggaaaccgtgccgcgggtctctcgtggagctccggcctatgcacggcggtggggcttcagagcgctaccacccgccccggcgtcagtgcggtctcgacggcggcgatgccattgcgcagcggcgcgccgaactcggccatggcgatctcgaagacatcccccggagcagccttgatcccgtcggcgaaggacagcgtggcggtaccgaagtaatgcacgtggacgtcgcccggacggaggaactgcgcgtacttgaaatggtggtactcgaggttctccaggctgtggcacatgttgtcctcgccggaaaggaacgcctgctgccagagcacttcgccgtcgcgcaggatccggctctcgccctgcaggtggcgcggcagttcgccgactcgcagctccggcccgtagcagcaggcgcgtagcttggaatgcgccaggtacaggtagttgcggcgctccatcaggtggtcggagaactcgttgcccagggcgtagccgagccggtaaggccggcggtcatcgccgatcaggtagagcccgaccagctccggttcctcgccggcgtcctcggcgaaggccggtagcgggaagtccgcgccggggcgcacgacgatgccgccgtcgcccttgtagaaccattcgggctgcgcgccgacctggcccgccggtggcttgccgccctccaggccccacctgaagatgcgcatggtgtcggtcagcgcggtctcgtcgccctggttctgctggtgcatgcggtcgcgcgtcgcggcgctgcccaggtgggtcaggccggtgccgctgaccaggcaatgggccgggtcgtcatgatccagcggcggcagcacccttccctcctccagcaacccggcatagtccgggcctggctcgctgcctcggcgcagcacctcgtcgtgcaggccgctgcccgcgcgaatcgccgccagccccagttcgcgcgtgctgcgcacgccgcgcagcacctgtatcccggcgccttcgacgacgccgacccggcgctgccctgcccggtcctcgaattgaatcagccgcatctcggctcctcctgtgggctccgactatcactcgatgatgatgaaatccttgaggtgctcttcggatatctccaggcccaggccgggcttgtggtcgtccagctggatatagccgtcgaccggctgcggctcgcccttgaacacgtagtagaacagctcgttgccgacctcgacgtcgaacaccgggaagaactcggccatcggcgaggcggtgctggccatggtcaggtgatagttgtgcaactgtccggcgtgcgggatcaccggcactgaccaggcctcggccatggcgttgatcttgcgcgcggcggtgatcccgccgacgcggttggtgtcgtactggatgacgtccaccgcgcggcgctccagcaggtccttgaagccgtggccggtgaattcgtgctcgccgccggagatcggcatgatccccatcttcttcagctcgacgtagccctcgatgtcatcggcgatcaccggctcctccagccagcgcggttcgaactcggcgagcttcggcagcatccgccgggcgtattccagggtccagcccatgtagcattcgagcatgatgtcgatgtccggcccggccagttcgcgtagcgcgcggacctgctcgatgttcctgcgcatgcccgtcgggccgtccttggggccatagccgaagcgcatcttcagcgcggtgaagccctggttcaggtagccctgggcctcttcgaggaaggcgtcgaggttgtcgttggcgtagagcttcgaggcgtaggtccagatcttctccttggtgcggccgccgagcagcttgaacaccggcttgttcaccgccttgcccatgatgtcccagatcgccaggtccaccgccgagatggctgccatgccgatgcccttgcggccccaggcgtgggtgcggcgatacatcttctgccagatgtactcgttgtcgaacgggtcttcgccgatgcagatcggcgccaggtagaggtcgacgatttccttcgccacgcgcggcgccagggcgcagttgccgatgccgacgaggccgtcgtcggtctcgatctccaccaccagccagccgtggaagcggaacgaacccatggcgtctcccttctcgaacaggatgtcgctggcattggtgcagaagtgcgcctgcggcgggacgaccttgcccttccattcgaagacgcgggtacggacggatttgattttcatgtcgcagctcctatcggtgcgtagtgtgggtcagccggcctgccgcgctcgcagcgggacggacgacgatccggaggtcttcagccgggccagcaggcaggcgccgagcaggccgacggcggccagggcgaacatgccggcgcgcgggtcggcgaactggctttccatgagggtcttgaggttcggcgcgacgaagccgccgaggttgcccagggagttgatcagggcgatgccgctggccgcggctgcaccgctcaggtagccggtgggaagggtccagaacagcggctgcaccgagacgaagccggacgcggcgaagcagaaggcgatcaccgccaggcccaggttgccggccagcgccgaggcggcgatgccggctgcggccaagcccagcatggccaccgcgagctggcgatgctggccgctgcggtcggcctggcgggtcaccaggcgcgttaccaccagggcgcagacccagggaatcgcggtgatcaggccgacgttcaggccgacctggccgtcgaggaagctggcgatgcgggtcggcaggtagaacaccacgccgtacacgctcatctggatggtgaagtagaccaggcagaacttcagcacctggccgctgcgcagggcgctgaggaagccgtgcgggccgcgtgcctgtttgcgggtgtcttcttcggccagctcgccttccagcgcccgcttctgctcgtcgctcagccagccggcatcgcgcgggcggtcgaccaggtagaagtaggcggcaatgccgaccagcgaggccagcaggccctcggtgacgaacagccactgccagttggccaggccgaagatgccgtggaactccagcagccagccggacagcggaccgcccagcaccagcgccagcggcaggccgaaatagaacaggccgagcgcctgggcacggctgcgctgcgggaaccagtaggtgaggtagaggatgatgccggggaagaagcccgcctcggcgacgcccagcaggaagcgcaggacatagaaagtcatggcatcgtcggcgaacatcatcgccgccgagaccaggccccaggtgaccatgatcctgcacagccagaccctggcgccgaggcggtgcagcatcaggttgctgggcacctcgaagcaggcgtagccgatgaagaagatgcttgcgccgaacgcgaaggcggcatcgccgaggccggtgtcggcttgcaggaaggcccgcgcgtagccgacgttggcccggtcgatgaaagccagtacatacatcaggaccaggaaaggcaggagccgcaggcggctggtggcgatcgccgaggacagcagcctggcgtggtcgttcatggcgctcatggagggcttccttctcgttgttgttcgacgcggaggcggcatggccgcttgcgttgggccgactgtagccaggccgctcccgcgcggataatcacttctacgcattcatcgataaccccaggcaataccttttcacaaatcagccaatcgccggttatcgggcagcagcgagagcggccctgcgctcagagcagcggcagggaatacgagaggatcaggcggttctcgtcgacatcggcggcatggttggaccgcagcatggcgttgcgccaacgcaggccgaggttcttcagcgggccgctctggatcacgtaggcgacgtccacgtcgcgttcccaggcgcggccgtcgtccatcgccttcgtccgggcatgggcgccgctggcgtagcgggccatggcggtcagcccaggaatgcccagggcgacgaagtcgtagtcgtagcgcagttgccaggagcgctcgccggcgctggtgaagttgcgcacctggatgtcgttgaccaacggcgtgctggtgccggcgatgtagagcatcccgtcgtcgccgtacatgcgctggtagccggcgccgaggctgtggccgccgcgggtcgcgcttaagaaaccggtcagcgcgcgattctccagatcaccgagcttcgcggcaccttcgtcgcgcgtgtcgaagagcccgacgctggcgcccaggcgccagccgccgaagctctgcttgtggctcaagctgtagtagtcctgccggtagatgtcttgcagtcgcgcctgccacagcccgacctggctgcgctcggcattgaagcggtactccgcgcccaggtagtcgaaacggtcggagaacaccccgccgcgcccatccaacgagaggtcctggtggtcgctggagttgcgctggctgagcgaacgcatctgcccgccgtgcagggtcaggccggcgatttccctggaggtcagcatgccgccctggaaggtctgtggcagcaggcggccgtcgttgcgcaggaggattggcagttccggcagcagttcgccgagcttcagctcggtattcgacagcttcagcttcggcgccacgcccagtcgcgcgtagtcgtccgctgcgcgtccgtcggcgtggcgtggcagcagcccggagccagcacgatcagggctgctgtcgagcttcaggccgagctggccgatcagctcgacgccgaggcccagggtgccctgggtatagccggacttcgcctgtaggagaaagccttgggcccactcctcctgtttcgactgcgccgcgccgggctggcggaagtcgcgattgaaatagagattgcgcaggccgaggctgacgctggcgtcttcgataaagccctcggcgccggcgagcgacggcaggccggccagcaggaccggggcgagcgaggcggatttcagcaggttcggagcggaacgggtcattgttgtttttccttttcccaggccgaagcgagccgtggagcgctgcggctccaggcgatgtgtctctcgtcgaaggtgcgacgcctcctgccccgccgcgacggtacagggaggcgccagggagcgcgttacgaaggggcggcgctctggttgtcgtgtcgcatgcaggcgatcaggctttgcgcctgcccatccggcaggcgatctcgaacgcctggcgggtggcgccgacgtcggcccttccctgcccggcgatatcgaaggcggtaccgtgggccggcgtagcgatggggatcggcaggccgccctggacggttacgccgcgggagaagcccatcagcttgatcgcgatctgcccctggtcgtggtacatggtcaccaccgcgtcgaaggcacgggcgtcgccctgcaccttgaggaaaatggtgtcggcgggatacgggccgtcggcggcgatcccctgttcgcgcgccttctgcaccgccggagcgatgatgtccagctcctcgcggccgaagctgccgttgtcgccgttgtgcgggttcagtccgcagacgccgatgcgcggccgcgccaggccgctgcggcgcagcgcgtcgtcgatcaggcggatcgcctcccctacccgctcctggctgagcaggcccggcacctcggccagggctacgtgggaggtcacccgcgaggtccagaggtcgtcgaggacgttgaactcgcagaacgggccgccgaaccccaggcgctcggcgaaccagtgcaactcgtcgctgtggtccatgccggccatgtgcagcgaggtcttgttcagcgggccgaagaggatcgcgtcggtcctgccgctgcgggtcagttcgagggccagcgcgagggtttccaggctgtagcggccaccgacggcgctcgcttcgctgcgtgggaactcgtccccgccctggctgagccagggatgcagcagtggcgcggcgtcggcgaaatccagggtttccagcgcgtcgatgcgccggtaggggaattcgcagccggcgatgcgcatgccgcggcgcatttccgcttcgtcggcgatcagcacgatgtgcgcctgctcgcgcacctcggtgtcggccagcaggcgggcgatcagttccgggccgatgccggccggatcgcccaggaccatggccagtcgcggtagggatggagcgttcatggggaagtcctcgggtcgggcgacgcctgctgcaggcgcacggtgtcgggtacggtgcggtagatgcgccgcgcgttgctatggaaaagccgttcctggtcggcgtacggcaggtcggcgacgatgcgtttgaaaccgccatagatgtcgtcgaacgagccgcacaggctgtccaccgggaagttgctggcgaacatcgcccgctcgacgccgaacagggcgatgctttcgcggacgatccaggcgttgtcctcgacgctccagcgccggccggcctggccgatgccggagatcttcaacgccacgttggggcattcggcgaagcgcgccatggcccgttgccaggcggccagcccctcctcgctgcgatcggacggcaggccggcgtggttgagcacgatcagcgtatcggggaagtcgcgcgccaggcatgcggcctcggcgaggttccaccagggtgtctgcaggtcgaagtgcaggccgtgccgggccagctcggcatagccgcgacgccagcgctcgtcgctcatcaggctgcgcaactcgccgacctgttgcgggcgttgcggaccgccgggcttgtggcggacgctgcggacccgtgcgaagcccgcctgcgccgccagcacctcggcggcgtccggcgcgtccagccaggcctgcgccaccactgcgtggggcgcgccatggcgttcggcgaggtgatgcacgaagcgtgtttcgccgagcggatcgcgcgggtcccactcggtttccacgtagaccgtctcgaccacccggtgtgcgccgacgtcgccgaagtagtccgccggcaggtagcggcgcttgatcgcgctgtagtcgccgtagcggaacggaatcttggcgtcctccgcgagccaggggtggtagttcgcctgcgggtcccagaaatgatgatgggcgtcgacgatcggcccgtcgtacagctcagccatgctttgcctcggtcttgtccagggaaatcagcagggtgccggcgatgaaggctgccgagcagagggcgaagaagcccagcaccgcggcatatccgcccaggtgttgcagcagcagcccgaccaggatcggcacggcgatgccgccgaggctgccggccatgttcatcaccccgccgaccaggccgacccgggccggagcggcgagcaaggccggaaagctccagtacaggctgccccacatcaggaagaaggcggtcagcgccagcagggtcacggcggcataggcatcttccaggctcggcaacagcaggaaggcgaccagcgccgcgaggcccgagaccgtcagcaggcccttggccgccaggccgcggcgcacgcccttgcggatcagcaggtcgcagaggaagccgccgaccagggaaccgacggcgccgcagaggaagatgacgaaggtcgcggcgccgatacccttgatatcgaagccgcgcgcctgcgccaggtagctaggaccccaggtcagcaggccgaagaacaccatggcccaactggcgcggccgaggacgataccgaccagggagcgaccggcgatgcccagtcttccgccggcctggcagtccgcttcggcgagcggggtggtgcggtcggcgttgatccggtccagctcggcggcgttgaccccgggatgctcggccgggtcgtcgcgcaggtagtgccaggccagccaggccatggccagggtggcgatgccggcgatgaagaaggcgctgcgccaggagccgagcacggcgatcaggtaggcgatgaccagtccgccgagagcgacgcccagcggccctccgcagtccatcagcacggcgccgcggctgcgttcgctggagcccagccacagcgagttgagcttgccgccggaggggaacagcggcgcttccgccgcgcccagggcgacccgggcgaacatcagcgacaggccgccgctggcgaaggccgcgagggtctggaaggctccccagaggccggtggaccagccgatcacccggcgcgggccgtagcggtcgatcagccagccgccgggaatctgcaacagcgcgtaggcccagaagaagctgctgaggatcagcccctgcatgctcggcgtgagctggaattcaccggcgatggtgggcatggcgatggacagcgagacccggtcgaccaggttgatcaccgtcagggcgaagacgatggcgaagatgcgccagcggacgttgctgggttttgcggcagtggccttgtcctgggcaggatcagcctggagcacggcggtctgtgcctgagccatgggtcgtacctcttttattgttgttcttgtgctgcggaactgggttggcaggtccggcacgcccactatccggctttccatcgataaccgtctaatcaaagctgctcatacggccatttcctacggttatcgctccaggtatccgacatccgcttccactcataaccccaggctatcggtgtatgccttattttgagtggacgcttatcggtgcgcttcgcacactccgctctacccataacaacaatgacaaccagaggtcctccatgcgtaccgcatatgcgcgctccgtcccctccttcctggccgcttgcgccctgctctgctgcaccaccctgcccgccctggcggctgcctggaaacccgaagagaacctggagatcgtcgtcgccggcggtcccggtggcggcaccgaccaactcgcccgcctggtccagtcggcgatcagccagaacaagctgctcgacgtcaacaccgtggtgctgaacaagggcggcggcaacggcgccgaagccttcctcgacctgaagctggccaagggcaacgcgcacaagctggtgatcggcaccaacaatgtctacctgctgccgctggtggcccggctgggctaccaatggaccgacctgacgccggtggcggcggtggccgaggacgacttcatcctctggacctaccaggcggcgccgtgggcggacgccgcggcgttcctcgccgatctgaagaaggacgcgacaggcatgcgcttcggcggcagccagtcgaaggacgtcgaccagactctaagcctgctgctcggcaagcaggtcggcggcaagctgacctacatccccttcaagagcggcagcgaggcgtccatccagttggccggcaggcacatcgccgccaacctcaacaacccggcggaaagcctcagccagtggcgcggcggccaggtccggccgctctgcgtgttcagccacgagcgcatgatctacaccgccaaggtcgctgccgagcagtcctgggcggacatccccacctgccacgagcagggcctgggcatcgaccagtaccgcttcccgcgcaccgtgttcctgcccggcggagtcagcgacgagcagcgcgccttctacgtcgagttgatgcgcaaggtcagccagaccgccgagttcagggactatgtcgaacgctcggcgctggcgccgaccttcctcgcaggcgaggacctggttagctacatcgagaaggaccgccagcgcgtcatcccgctgctccaggaagccggctggcttcgccagtaacccgcgtagcgcgaccaggagacgaacatgtccagctcatccgatgcgccgctggtcgccacccgctgggtggagatcggcctggcgctgttcaccgccgcgctcggcgcgatcgtcatgtacggcagccaggatatcggcatcggctggggcgacagcggccccgaggccggctatttccccttctacatcggcctgctgctgagcgccgccagcctcggcaacctgctcttggccctgtgccgctggcgggcgctgggtacctcgttcgtcgcccgcacggcctttcgccgggtgcttgcggtgttcctgccgatcgccgcctacgtggcggccatgccgttcgccgggatctacctcgcctccgcgttgttcatcgcctggttcatgtggcgcgaccgtagccgcgacaaaccctacggcgtgccgctgatcgtcacgctgtcctgcggcgcggcgctggccagctacctggtcttcgccgtctggttcaaggtgccgctggatgccggaatactggccgacctcgcggccttcgtcgggagcgccaggccatgagcgaattcgattccctgatgcagggcatgagcctggtcctcagcgcccatcacctcggcctgatggtgatcggcgtgctgctcggcatcctggtcggcgtgctgccgggcctcggtgcgccgaacggggtggcgctgctgctgccgctgaccttcagcatgtcgccggtgtcggcgatcatcctgctttcctgcatgtattggggcgcgttgttcggcggctcgatcacctcgatcctgttcaacatccccggcgagccgtcgtcggtggccaccaccttcgacggctacccgatggcgcgcaacggccaggccggcgaagcgctgaccgccgccttcacctcggcgctcctcggggcgctggtcggcgtgctgctgctgaccttcctgtccacccatatcgctcgcttcgccctggcgttcagctcgcccgagttcttcgccgtctacctgctggcgttctgcaccttcatcggcatgagccgcaacccgccattgaagaccctggtggcaatgaccatcggcttcgccatggccgccgtgggcatggataccgtgtccggcgacctgcgcctgaccttcgaccagccctggctgctttccgggctgagtttcgaggtggcggtgatcggcctgttcggcatcggcgagatcctctgcacggtggaggaaggcctggtgtttcgcggcgagcgcgcacgcatcacgccgatggtgatcctgcgtacctgggccaggctgccgcgctactggctgacctggctgcgcagcgcgctggtcggctgctggatgggcgtcactccgggcggccccaccgccgcctcgttcatgagctacagcctggcgcggcgcttctcgaagaaccgcgagaacttcggcaacggcgaggtggaaggcgtgatcgctccggagacagccgaccacagcgccggcaccagcgccctgctgccgatgctgacgctcggcatccccggctcggcgaccgccgcggtgatgctcggtggcctgatgatctgggggctgcatcccgggccgacgctgttcgtcgaacagcacgacttcgtctggggcctgatcgccagcatgtacctgggcaacgtggtcagcctgatcgtggtactggcgaccgtgccgctgttcgcctcgatcctgcggattccgttcgccatcgtcgcaccgatcatcgtcatggtctgcgccatcggggcctactcggtgcacaacgccatgctcgacgtggtcctgatgctgctgttcggcgcgctcggctacctgttcaagaaactcggctaccccatcgccccgctggtgctcgccgcggtgctcggcgacaaggccgaggacgcgttccgccagtcgatgctgttctccgacgggcaactctcggtgttctggtccaacccgctggtggccggcctgaccggcgcggcgctggcgatgctgctctggccgttgctggcgcggtgcgccggggcgctgttccggcgtggccggcggagtctccggcatgccgcctgagcctgcgtctggcggcggggtggatttcttgtcaccctgggtctccccgccgccagcgagatacgccatgtcccggattcccgacgccagcatcatccacagccgcctgcgcctgcgccagttgcgcctgatgctggccctggaggaactcggctcgctgcgccgcgccgccgacgagatcggcatgacccagccggcggcgaccaagatgctccacgaggccgaagacctgctcggcgtcgagttgttcgagcgtttgccgcgcggcatgcgcgcgacgcctttcggcgagacgctgatctattactcgcggatgatcttcgccgagctgtccgggatgcgcgaggaactggtcgcgctggagtccggcaacctcggccgggtcaccgtcggagcgatcccggcgctggcctcgagcctgctgacgcgcaccatcgccaccctgaagcagagtcatccacggctgtcgatgagcatccaggtggacaccagcgacgtgctggtccaggccctgcaacaggaccagttggacgtggtgctcggacgcatccccagcggcgcgcgcaccgacgacctggtgttcgacagcctcggcgaggaagaactctgcgtggtggtcggcgcgcagaacccgttgtcgcaggcacgcaagctggactggggcgagttgcaggagctgacttgggtgttgcagcagcaccccagcccgatgcgcgggatcgtcaaccaggccttccacaatgcgcgcatcgacctgccgagcagtatcgtcgagaccacctcgatcatgaccctgctctccctgctgcaacagaccgacatgatcggcatcactccacgctcggtgatcgaggactacccgggcaagcacctgctggcgatcctgccgatccagctggagccgcgcctgccgccctacggcctgatcacccgacgcaaccgggtccactcctcggccatgcagaccttcatggccagcgtacatgccgaacaggcgcggcacctggcgaagtgagcggcactagcacaaatgagctaatagccgcgagccggctggacctctaacatcctgcggcatttcaacggagtgaatgccatgccctcgatcaagcccttcggtctcgccctgctcgtcctcggtctcagcgcctgcgcctccctcggtcagtcggggaatcgcgacaacgaggtcaaggtcgccgcgcagaagctcatcggccagcccgccggcaaggccttcgaactgttcggcaagcccgaccagggcctcggcccttcgtcctacggtagcggcggcttctacgcctggaaccgcgtgcggacccacatggggccggacaaggtcttcatacagaccggcaccgagtacgtcggccagcgcgagacctgggtcggcgtcggtggccagggggtcgccggcatggcgccggtgagtagcgaggcggtctatcgcaagaccggctactacgagaacgagaccatcctcgactatttctgcagcatcaccctgtacaccgacagccgggacatcatcaccaacgccagcgtgatcgactgccgggacagccgctgacggggccgccgggccccggccttccttctcgacgacgaacccccaacgcggaagccctgcggatcatggcgttacgctatcgttttttatttccttgaatccttgttttcatacctcttatttcgtctggaaataagatagatcgattcattcttttctcccgacccttggcccctgccaaactcccttcgccacgggatacccccgcgccgacatggcggcattcccatccggaatgtccgccccacattgcaaggccctgatcgtcgatcgcggccgacaaggagctggaactttcatgaagaaactccccgccatcaccgccctcgccctcgccctgatctccggcctggcccaggccgaccgcctggaggacatccgcaaggccggcgtattgcgcgtcgcgtccttcgacagcaacccgccgttcggtttcgtcgacgccaagagcaagcagatcgaaggcctcgacgtcgactatgccaaggccctggccgacaagctgggcgtccggctgcaagtgctgccgaccaacccggccaaccgcatcccgctgctgacggcgaacaaggtcgacctggtcctggccaacttcaccatcaccccggagcgtgcgcagcaggtggacttcagcatcccctacttctcctccggccagcagttcatcgtcaagaaaggcaccctgacctcgccggaagtcctcaacaagtggcgggtcggcgtggacaagggcacggtcaacgaaggcgtgctgcgcgagaagttccccggcgccaaggtcatcgcctacgacgacacgcccttcgctttcaccgccctgcgcaacggccaggtccaggccatcacccaggacggtccgaagctgatcggcctgctggccaacgtgcccgaccgcgacaagtacgaagtgccgcccttcaccatttccaacgacctgatcggcgtcggtattcccaagggcgagaaggccctgaccgagttcgtcgacaagagcctgcgcgagctggagcaggacggccaggcgcagaagatctacgacacctggttcggtccgcagaccaagaccccgctggcgcgcctgtacaagatcggcgacaagagctgaacggcccgcttcgcccgcacgacccgcgcgcctcacttcgctgaggcgcgtttttcgttctacccgacggaatcccgcacatgttcggcgaacttctcgccccgcagtacctgcgctggttgctcgacggcttcctgctgaccctcggtcttgccctgctcagttgcctgctcgccaccctgatcggcgcccccctggccatcgcccggctgtcgcgccggcgcctgctgtcctggccggcgcgcgcctacctggcgctgttccgcaataccccgctgctggtgcagctgttcttctggtacttcggcgttcccgcgctgctgccggaggcgctggtgagctggctgaacacgccgcacgagacgcccttgctcgactggccgtccttcgagttcctcgccggtgcctgggggctgaccctctatacctcggctttcgtcgccgaggagttccgcgccggcatcgcctcggtacgccccgagcagcgcgccgccggcctcgccctggggctgacccagcgccaggtatggcgcgtggtggtgctgccgcaggccctgcgcacggctctgccgccgctgctcgggcagtacatgaatgcgctgaagaactcctcgctggcgatggccatcggcctggccgagctgtcctacgcttcgcgccaggtggaaaccgagaccttcaagaccttccaggccttcggtatcgccacccttctctacatcggcgccatcgccctgatcgaagccttcggccaggcgttgcagcagacccgccgctaccgccagggaggtgcgtgagatggatttctcggtcatctcggacaacctgtcctacctgctgctcggcgcctacccggacggcccgctcggcggagcggcgctgaccctgctgctggcgtcgctctccggactggcttcggcggtgctcggcctggtcctcggcgtggccctcgcggtgctgcccggcaagccgcgcctgctgctggtggcgctgctcggcttcttccgcgcgatcccggtgctgatgctgatcttctggacctacttcctgctgccgatcgtcttccatgtcgacgtaccggcgctggccaccgtggtctgcgcgctgtcgctgatcggcggcgcctacctcgcccactcggtgtacgccggcatccacagcctccccgccgggcagtgggcggccgcccgcgcgctcggactgcggccgtggcaggtattgcgcctggtgatcctgccgcaggcgctgccggtgatgctgccatccttcctcaaccagtgggtgtcgctgatcaaggacacttccctggcctacgtgatcggcgtcggcgagctgtccttcgtcgccacccaggtgagcaaccgggtgatggtccacccgacggagatcttcctgttcgtcgccctgctctacttcctgctctgcaccagcctcgacctggccgccgctttcctcgcccgccgccggcgggcctgagcggcggccggtggctcaggcgtcgccgcgcgcccgcgcgtagtcgaccaggtcgccgaggtaatgcggcgaggcgcgcagaacgccatcgtcccagccgtagagcacgcccagcgccgacacctccatggcccaccagccccaggcgtaggggccggtcaggcggcgggtcttcttctgcgccttgggggaaagctggaagaactcccggtactggctttgcaggtaaggcgccagcgcctgggcgtcgctgccgtccgcctcttcgaagaacgcccgcaactgcccgaacggccgtggatggaaggtttcctcgctggcggaagtcaggccgagggcggccgcgccgagatagtcgagcaggcggtcggtatcgaactgcaggacctcctcgaccagcgccgggatgagctcctgggcatcgagcagcacgcccatggcgagcagttgcagcgcgaacggatactggcctgtgcgcggcgccagggccggcgccgtctcgaagtcgacctcgccctgctcgcgcaggctgtcgcgggcggcgccgagcagccggctgtagtccagccacagcgcggcggtctccaggtagatggagcgcagttcggcgccggccaggccccggtcgatggccttgagcagcagcgtactggcgttttccgcggcctggccccaggcccaggcgttttccagggctgcgtgcccttgcgcggcgaacggctggcgatagccgtggctccgggaaaacctgtcgagcgcggcgatcagttcgcgccagtcggctttccagtcggcgaggtcgatgttccttcgcggcgcccggtcggtgcgggccaggttgcgccatagcggcagggcttcggcgagtcggttgtccagggtgagggggaatgcgtgcatggcggcctgtggtgatcgcggccgtttccggccgttccgtgcgatccggagtgcggccgtccaggccgcatccggtatggacggccgatgctagcgcagcgtggtgccccgcggaaggtctgttctagcggcccgccggctggttccggtagtagtcgaggaaggcctccagcggcagtgccttgccgaaatgccagccctggccgagggcctcgggcgagcggcgcagcacgtggtcggcctgggcctgtgtctcgatcccttcgacgaccacgccgatctccaggtgctcggccatcgagcagagcttgtcgaagatcagttcgacggcgctgctgtcgccgatggactgagtgaagaccttgtcgatcttgatcgcgtctaccggcaggttggccaggtagaccaggttcgaatgaccggtgccgaaatcgtccacgtagatcttcaggccgagttcgcgcaggcggttcatcccggccagcaggcagccctgggcctcggtggtgcgctcggtcagttccagcgcgacctgttccgggcgcacgctttccctggccatctggcgcatggcgaaatcaatgaaaccggggtcggcgatgtccttgccggtgacgttgacgctgacgtagaagctccgctgctccctcagcaacggcccgagctgcttcagggcgcggcggaagacgaaacgggtcagcagttcgatgtcgccgctctcctccagggcgccgatgaagacatccggggaaacccgtcccaggctgctatcggtccagcgcgccagggcctcgaccccggcgcagcggccgctggccaggcgcacgatgggctggtagtgcacctccagggcctcgcgcttcaacgcgcgcagcagcctggccggcagtttttcgtcgttgaggaagccgaacaggtagctgagcagcagcatgacgccgaacaacagcccgccgccgatcgccgcggccatggccgcgcgtccgggctcggtgccaagcaggccgcgttcacggagaagggagaccacgcagatgtcctgcgtcgggtcgcacaggcttatctgccgggcgccgatgaagcgcggccagccgggccggccgagcgcctcgaggggctggtcgtcgtcccaggcgaaacggtggtagatgtagtcgccgccactgctgaccgccgccgccgagatgcccgggtccgggtggtcgacatcgaaataggcgtgcggggcaatgaatacgacggcgttgccgcgactgaccagcccggtgggcagcgcctgcaacggcaggggcatgccctctgtccagaagcgggtgccggcggcatctacccggtcgggcgcggacaatccccagggcgcgcgcagccggccccggacgcccgtgcacatgacccggtcgccgctgatcctgccaacgtcgctcatgaagcgcgactcgagcacgatggaacgcagcatttccagatcccggtcgctgcaggccggcgcgctgccggcgttcatctcgcggagcatctggtccgccgcggaggaaatctccagtgcccgctccagcgccctctcggtgtacgagcgcaggtgcgcgccgtcgtgctggcgatccagttcgttgatgacgaagatcccacagacaccgcccaccagggtggtggtgagcagtatcggcaggatgcgtcgccagttgatccggccttctgcagccgttccacgctcggacataccttcttccgcctaatgaatccatggaaagcacgccagattgccgaacagcttcacgggccctgccgggccgtgcgcagaaccttttcagatttgtcccgatcgtgacaacgctaccttcgccagcgccgtccagtccgattccccgtcgccatgggcgatggcttcgagcaacacgtcgtgcaacaggctggccagcggcagcggcacgttgtggcgcttgccggcggacagcgccaggtcgacatccttcaacccgaggaccaggcggaacctggccggggtgaaacgctgctcgacgatctgcgggccgtagttgcgatagacaggcgcatcgaaaagcgtcgaggacatgagctccatgaaccggccgggctcgacgcccaggcgcttcaccagggcgacgctttcgcccatgctttcgatggcgctggcgatcatgaagttaccagagatcttcaccgccattgccccgcgcgggtcttttccgaaaaaccatgtcttctgtcccataatttccagcagcgccttgacttgctcgatggcttcctccggaccgccgacgacgatgttcagcttgccggcctccgccacgtcggtgcgaccgaacaccggcgcggcgacgaacgcgaggccctggcgctggtgcgcctggtcgagcgcctcgacgcaatcgagcgacagggtcgacatgctcaggtggatgagacccggcctcgcccgttcgagcgcgccgctgtcgagcagcacgccgcgaatcgcctggtcgtccgccagcatgctgatgaccacgtcgaggccgaacagctcgccgacctcctccgccctggcagcgcccagcgccaccaggggctcgcaggccgccgcggaacggttccacaccgtcacttcgagtcccgcctgcaccaggcgggtggccatggcggcgcccatgccgcccaggcccagaaatccgactttcatccgtttcactcctcgtggggtcttgtaggttccggatctaccggagacaggctggccgctggcagttcctcgaggaggaacacctggcggtccgccaggagatcggcgacggcatcggccatcgccctgtagtgcggcatccgtcggtgccgctcgatggcgtcgcggtcggcccagcgctcgacgaagacgaagcgcccggcctcgtcgaggctccggtgcaggacataggacaggcagccgtcctcggcccgcgacggctgcacgcaggccagcagcagccgctcgacctccgccgccctgccctcgcgcgcctgcaacagcgctaccacacggaccgcctggttcatgcgtcggctccgacgcgcaccaccagcttgccgaaattgcgtccctggagcaggccgaagaaggcctcgggggcattctccaggccgtcgacccgctcttcgcggtactggatgaggccgtcggcgaaccacttcgacatgtcgcgctggaattcatcgtagcgatggccgtagtcgtcgaagatgatgaagccctgcaccttgatgcgcttgcgcaggatcgtgcccatcagcgccggcaagcggtccggcccgggtggcagctcggtgtcgttgtagtgggcgacgatgccgcagaccgggatccgggccttggcgttgagcagcgggaagacggcgtcgaagaccttgccgccgacgttctcgtaatagatgtcgatgccgtccgggcaggcctcggccagtcgttcggcgaagtccgcggcatggtggtcgaggcaggcatcgaagccgagcacctgcacggcgtggcggcatttttccgcaccgccggcgacgccgaccactcggcagcccttgagcttgccgatctgtccgacggtggcgccgaccggcccggtggcggcggccaccaccagggtctcgccggcctggggcttgccgatgtcgagcaggcccatgtaggcggtgaagccgggcatgccgagcaggcccagggcgtaggacggatgctccggcgactcgcccaggcgcgccaggccgctgccgtcggatagcgcgtagtcctgccagccgttggccgagagtacccagtcgccgaccttgaacccgggatggttcgaggcttccacccggctgaccgtgccgccgaccatgaccgcgccgagttccaccggcggcgcgtaggacggcgcgtcgctcatccgtccgcgcatgtagggatcgagcgacaggtagacggtgcgcagcagcacctggcccgcgccgggctcaggaagcggaacctgctcgatgcggaagttatcccgggtcggggcgccgtgggggcgcgaggcgaggacgatgcggcggttgacctgcgtggattgggacatttccagactcctctgtctgacgaacgtggcgaacggctcataccgtgcgccgggcaaattagaccagtcaactactgacgggtcgaaaaaatacccgcctctcgcggggcgggtatttcctggcggtacctcagatttccagcaggctgcgggtggtctgcatggctgtctccagcggtcccgggctgcggtgcagcttgctcagcaggctcgcgccgagccacaactggtacagcgcgctggccatgtgccgggcatcgcagggcgcgagggagccgtcgtcgtggccctgcccgaggcagccgaccaggcgttcgatgatcccgtcggagccgtcgcgcagggtgatgcgcatgctttccgaaaggtccgcgacctcggcgctgagcttgaccaccaggcagcgctgctcgtcgcagggcgggcaggcgttgtccagccacttctgccagtagctcatcagtcgttcgcgggcattcagccctggcgcggagaagcgttggtccatgtccgccaggtagacgcggaagtagtcctccagcagggcctggccgaactgttccttggatttgaagtaatggtagaacgagcccttgggaacgcccgcgctctgcaggatttcgttgaggccgactccggagaagcctttgaccgccatgatccggtatccggtatcgagcagatgctggcgggtgtcgtcgtagctggttttcatggggcgcacggtagcttgaattagaccagtcgtctagaaataattcgaagccatgagtatagcgccgacggcaactgcgccgctgtcgggaaccgtgcggaacggacgccggtccggcgcccgccccgctccgcggatttacccctcgcggacctagcaggccgcgaccgccacggcggcaggctccggctggaagcgcgcggcgaggaacggcgcgatgtccagcggcagcgtctcttcgtggaccagccggtcgagcagcaccccggtgatcgccgacgtgaggatgccggtgcggaaatgcccgcaggcattcaggtagccctccacttcagccaccggaccgagaatcggcagttcgtccggcgagcccgggcgcaggccggcccaggtgcgcttgaggttgacctgttgcagctccggcacgcaacgcaccgcgccctgcaccaggccggcgatttccgggaaggtgttgctgacgtcgaagcccttgtcctcggtggtgctgccgatcaggatctcgccattgtccttctgcgccatgtagcagtcgctggtggtcaggcaaccgttcagcagtcgtggcatgcgctcggtgaggacgatctggcccttcaccggcttcaccgggatgcgccggccggtggccatttcgctgagttccgcggcccaggcgccggcggcgttgatcagggtccggcaatgcagcaccccggcattgtccgtgcgcaccccgctgatccgccggccctggcgcagcacgccggtgacgttggttcccggcaacagctcgacgccgttctggcgcgccgcctccaggtaggcgtcggccaggcggaacgggctgacctggtggtcgcagaggaattccagcgcgccgtgggccgcgtggctgaccgccggctcggcacgacgcagttcctcgcggtccagccagcgcacctgctcggccagatgcgggatctgcgccacgatgtgctcggcgtactggcgatcctcgtcgtcctggatcacgtatttcagcccggtgcgctcgaacttgaagtccatcccgtggcgttcgatcagttctcggtgcagttccgggtacagcgcgttggattgcagggcgaggtcgaagaacgccggcggcaggatgtgcggcgtgctcgcgtccaccgccaccgccgcgccctgggcctcgcgccggttgcgggaggacatcatgcggaagaagatcaccccgcagcccagtcccaccgattcgccgatggcccagaggccgccggccgaggcgcgggtggcgttgcccggtcgcttgtcgtcgaccacggcgatgcgcaggttgccgcgcctggacagttggtaggcgcaggacgcgccgatcacgccgccgccggcaatcacgatgtcataggttctgttcatgttcaggcttccgtaccgaggttctggaatgcggaaaacgggatcggatcgatcgggaaacgcggccgcagccagccgacgtcatggcgtccggtggcgcggcgcaggcgatcgctgcagtagccgatgcacatccgcccctggcagtcgcccatgccggcgcgggtgcgcatcttcagcccggcgatgtcctgcacgccctgttcgagcgcgcgctcgatgtcgccacgggtgacctgttcgcagcggcagatcaccgtatcggcccgcgccagttcgacctggcgggcgccgcgctgggtgtagcgctcgactccggcgcggaagcgcttgatcgcctccaggcgggcgagatgggattctcggcgttcgatggcctcggcgggcgcgatggcctcgcgttgcaggaggatcgacaaggccgcgatgcgcccgccgatcatcgccgcctcgccgccgcggatacccgccatgtcgccggccaggtggatgtgcggttggctgctctgctgccagacgttgcattccgcgcgcaggtatccgtcgtcgctgaagccgtgctccagacccaactgctggctgagctgggtgcgtgggatgaagccatagccgaccgccagggtgctggccttcaccggtcgcgcgttttccaggtcgggccgccactcttcgtcgtagggcgctaccgtcacttccgtcagttccccctcgccgctggcctccaccacgccccagccatagtgcagcggaatgccgttgagcttgagatagccgagcatgctcaggccgtcgaggaacagttgcggcttgttcagcagcgccaggctttccctggccatgcggccgaacgcgcaggcctcgtagaccccggcgacacgtaccccggccgcatgcagctggcaggccaccagtggcagcagcgggccgctgccggcgatcagggtatcgcccaggggcttcaccacgccgctcttgatctgcaattgcaggccgccgaggagcatcaccccgggcagggtccagccggggaacggcacgctgcgctcatggcagccggtggccaggagcaggtgcgaatactccacctcgtgcagccgttccgcctcgtcgaggaccatcaggcgctggccgtcgccaccgaccacgcggctgttcaggcgcaggtcgatgtgcccggcgcaggcggagaaatcgcgccgcagtttttccagcatccgggtgtagcgcgcgccgaggtaggccggatcgacgccggcccgcaaggggccgcgatagaccaccccgccgggacgcgaggcctcgtcgaagaggacgcaggggaccccgcgcctggccagctcgatggctgcggccatgccggccgagccgccgccgacgatcaccgggcgcaggttcatggccgttcctcctggtcgaagcggttgctttcggtttccacccgcatgcccggccggacgacggtctggcaggcgcggcgcttgggccggccgtcgatggcgaccaggcagcagtggcatacgcccatgccgcagaaggcgccgctggcctgcccatggtcgttgcgcgcgagccggcgcaggcccacggcattgagcacgttgagcacggtctcaccggcagccgccgcgacgggctggccattgaggtggatggtcatgtctgcccgcgagaggggctggatatcgtgttgacgttcaagaaggtgcattgccctttcatccgtgagagagagtcgggagccggcgacactaggagtcgggccgggcgcggacattgatccatgacaggtgggtatcttcccctgccaattctggtaggtggggtgcaggcgttcgcgcggaaaagtcgaacccgcgcctaccccagggtgccaagcagcaaagccggctcacccgtggaggccccatgctgcaatccttccagccgccctggtggaaacgcgcggtgatctaccaggtctacccgcgttcgttcaccgacagcgacggtgacctgcccggcctggtcgcgcgcctggaccacctgcgccgccttggcggcgacgccctctggccgtcaccggtgtatcgctcgcccgaccccggcgctgccgccgcagatcgccaccacccgtcgttccgtgatgtccgactcagtgcgcgcgggccacgccgcgcaagaggttggcgctgagcttgtcggcgttgcaggtcgcgatgttggccagcgagacgatgcctaccaggcgcttgttgcgatccattaccggcaagcggcgcttctccagttgcgccatgttcttcgccacatggtccacttcctcgtcctcgaagcagtagcgcagttccccgctcatcacctcgcgcaccgggcggtcggctccgagtccatcggcgaggccgcgcaccgccaggtcgcggtcggtgaccacgccggtcaggcgctcgccctcgttgaccagcaaggcgccgatatcggcttggcgcatcagcagcgccgcctcgccgagggtggtctggggggtgacggtacgtacttcgcgactcatgatttcacggactttcatcgttctgtctccttcttccggcgcgccgttttcggcgcggctctccctgcttgtgaatcgcccgcatacggggagttcgaagtttcttcccggcgtcgcagccatctacctagcgctcgcgcgggcagcgtgcggaaaacaaaaaatttgcccgcgttttctgatatctcgccgctgcccggattcttattctcgactccttctttggcatatgcgggaaaacgaaccatgcgtatcgacggtcatcgtcaggtggtttctaacgcaactgcacagcccggaccgctactgcgccctgcggatatgcaggcacgggctctacaggacctgttcgatgcgcagggggtgggggttcccgtcgaacatgccttgcgcatgcaggcggtggccaggcagacgaataccgtctttggcattcgcccggttgaaagaatcgtcaccacgctgatcgaagagggtttcccgaccaagggcttctcggtgaaggggaaaagctcgaactggggtccgcaggcggggttcatctgtgtcgaccagcatctcagcaagcgggaaaaccgcgacacggcggaaatacgcaagctgaacctggctgtggcgaagggaatggatggcggagcctatacccagaccgacctgcgcatctctcggcaacgccttgcggagctggtgcggaatttcggcctggtggcagacggtgtcgggccggttcgcctcctgaccgcgcagggccccagcggcaaacgctatgagttcgaggcccgccagcagccggacggcctctacaggatcagccgcctggggcggtcggaagcggtgcaggtactggccagcccggcttgcgggctggcgatgaccgccgattatgacctcttcctggtagcgccctcgatcgaggcgcatggcagtggtggtctcgatgcaagaaggaataccgcggtcagatacacccccctcggtgcaaaggatcccctgagcgaggacggattctatggcagggaggatatggccaggggaaacatcactccgcgcacgcggcaactggtggacgccctcaatgactgcctgggccggggggagcacagggagatgtttcaccacagcgacgatgcgggcaacccaggctcccatatgggtgacaacttcccggccaccttctaccttccccgggccatggagcatcggctcggagaagagtccgttcgcttcgacgaggtctgcgtggtggcggatcggaagagcttttccttgctggtcgagtgcatcaagggcaacggctatcacttcaccgcccatcccgactggaacgtgccgctgcggcccagcttccaggaggcgctcgactttttccaacgtaaggtctgatgcgcgaaggtcgttggcaaagcccgctttccccggcggcatgggcatcctgccgcctgttcgaacgggactttccgaagccccggaccggctctcttcggccgatgtgaaaacggcgcatcccgttggggatgcgccgtacgcttcagcggttcggcacggtcaggacgagcgtccgccgccgtggctgtgctggccacccttgcgtcctgcctcggaggccttttcccgatcgttggcgaagttcccgccgctctgctggccgcccttgcggcccgcctcggcggctctttccgggtcattggcgaaattgcctccgctctgctggccacccttgcgcccggcttcggcggcgcgctgcgggtcattggcgaagttgccgccgctggcctggccacccttgtggccgatctcctggtagaactccttgccgtggctcctggaggtagctgcgccgcctttctgcccggcttcgctggtgctcatgccttgtcgtttgtcggtcatgctcgtgtcctcctctcgagggttgaaagggatgcggcgtttttcgccgcgtgcacttactccgaaggcttgcgcgatggatcgttcaaactctttgcgggcgccctgggacgaaaaaatcattagccgatccaaggccttccgcttgccggaatatgctgggcggcgcgggaaactaagaatggatactccactggcaggcggcagcgggtataggcgaatcgtccaccgtatggatcagtccgcaagccagggcgtcttccggaccaaggatgcgcggataggccatcaggtagcgcgggatgtccaggcgttccggcgcatcacgggtgttctcggcgacgatccgggcgtaaagctccaggtcgtagtcgaggctcatcgcatattccgccatcctcgcatggtccaccgcgccatgcagggtccagtggaaaggatggaacaggaacttgctgtgggcactggcgctgcgtcgctcgccggcgaggaacaggatgttgcccatcgactcgacggtacccaggttgtgggtatgtatcggcaccggcagcgcgcgcaggaagttgtacagggtaaagccgtagctgcattccccgcccatggtggcgatgttgatccgcaactcctcggcctcctgttgcaggaccttggcgcaagtgttgatcagattgccgcaggtggacgaattgatcggcccggtgaaatggatgatgtgctgcttggacatgctcgcctctctttccgtatcggttcctcgacggtctgcaatgctttccctacagaggattgccgtacgtccgccgtgagccatcgtcgcgacgaatggcacccagggagcgagggcctgcgttcctcgccggcctccacgactcaacgtgcgtgcagtggcctccgggggccggtatcgagcgccacccatcccgccgaatgaactccggtgctgctgcgcacgccccacctgcacgacccacagccaggagcaatgccatgcgcgccctcaccttccacggcagccacgatgtccgtatcgatcgggttgccgaaccgcgcctgcaggaacccgacgacctgctgcttcgcgtgaccgccaccgccatctgcggctccgacctgcatctctaccggggcaagatcccgatggtcgagcagggcgacatcctcggccacgagttcatgggcgtcgtcgaggaagtcggctcggccgtgaccgcggtgcgtccgggcgaccgggtggtggtgcccttcgtcatcgcctgcggcgagtgcttcttctgccgcctgaacctgcacgccgcctgcgagaccaccaacccggggcgcggcgcgatcctcaacaagaagcagattccgccgggcgcggcgctctatggctacagccacctgtacggcggcgtgccgggtggccaggccgaatacgttcgggtgcccaaggccaacagcgggcctttcgtgattcccgacgtaatggaagacgaacgcgtgctgttcctcagcgacatcctccccaccggctaccaggcggtgcgcaatgccggcgtccgccagggcagtagcgtggcgatctacggcgccggcccggtcggcctgatggccgccgcctgcgcgcggatgttgggcgccgagcggatcttcatcgtcgaccaccatccctaccggctggacttcgccgcgcgctcctacggtgcgattcccatcgacttcgaccaggaggacgatcccgccgcggcgatcatcgagcgcaccgacgggcaccgcggcgtcgacgcggtgatcgacgcggtgggcttcgaggccaagggcagcgtcaccgaaaccgtgctcaccgcgctcaagctcgaagccagcagcggcaaggcactacgccagtgcatcgcggctgtccggcggggtggcacagtgagcgtgccgggcgtgtatgccggcttcatccatggcttcctgttcggcgatgccttcgacaagggcttgaccttcaagatgggccagacccatgtacaggcactgctgccggccttgctcgaacacatcggcaacggcgacctgcatcccgaggcgatcatcagccaccgcctgcgtctggacgacgcaccggagggctacgccctgttcgacgaaaaacgcgaggattgccgcaaggtcgtcctgcgcccatgagccatcgcggcgcggcggttcagtcggcgcgccgtcgctcctcgccgcatccgcactggcgctcttcctcggcggcgacgctttccggcgtctcgccgtcctgctcgcccatgtgctggtagcgctgacgcagttcgcgaagggtatcggcgtccaggtcgtccagaccgagcagcgcattgtgggcacgtcgggtgctgcgcaacagttcgtcgatcttgatatgcagcgcgtcggtatcgcggttctgggtgttctggatgaggaagaccatgaggaaggtgacaatggtggtcgaggtattgatcaccagttgccaggtatcgttgaagtcgaagaacggcccgctgatcgcccacaacaggatcaatccgagggcaacgacgaaggttggcgggcggccggcccagttggacaggcgttgggcgaaacgggaaaaactcatggcggcggactccctgctgcattctccctactgatgaccgcccgccccgccgggctttccaacgaccggacgaaatgaccggcgccctgcgggcgccggcgacttcaggcgggacgacgggcttcgccggggcccgctacgtcgggatcgtccggggcgaattccggttgcgcctcgctcgcctggtcgcgcttgccccgctcgggacgtagcgtcggcgaggcggggctcagcggggtgttttctgtctcgggtgtttcgcgcttggcggtcatctcgaggctcctctgccgtgcctccacgctaaggtgccgggcgtggaggccgggactcgcccgccgacgtcgggcatccgcgctcaaggcgctttgtcggcagccgcgccagcgcccaggtccgcacctgtcagcggatcggccatgggatcggagcgggtgcggtctgccattcgctgcaacacctcctgctcagtctcggacaggttcacgctggccgtgccgtcgcctccatccagggccggctgtggcgcctccacgtattcccagccatcaccctcgttccaggaaccgcgcgtgtcgccctcgccgcgcgacatgttcaggtaacgccgggcgaactccggcatcccttgcagcttgccttgcgggaagttcggctggatcgagtgcagggccttttcgaaggaaagctggtgcgccagctcgcgggtcatgaggaaggtcagcgcatccttgatgccgggatcgtcggtgaggttgatcagtcgttcgtaaacgatcttcgcacgcgcctcggcggcgatgttggaacgcaggtccgcggtcggctcgccgatggtatcgatgtaggccgcgctccagggtacgccaccggagttcaccagggcgggcccgccgccgtaaagcagcgaggtgatatgcgagtcgttgccgcctccggtcaacgaacggtacagctcggcctcctcctccaccgcttcggccagacgccccttggcgcccttgttgagcatgccgacgatcgaaccgatgatttccaggtggctgagttcctcggtggcgatgtccatcagcaggtccttgcgaccgggatcgcactcgccgaggccctgggtgaaatagcgcatggcggcggccagctcgccctgcggcccgccgaactgctccagcagcaggttggccaggccaggatcgggcgcggcgaccctgacggtgtactgcagtcgcttgtcatgtacgaacatggttcgttcctctgtgggttcgtggaccttccctccgacggacattcgaacaacggctattcgaagcggcgctttcatcctgcgcacggaagctcggaatcccgcagcgggcgatggttcagaacttttccccaacgcgtctcgcctggcgcaacggcgccgctgcgctgactgctaccggtcggaaaagaaactgaacgctgcgcccggcggccacctctgagcagacacatacacaccgaggagaaccgcgatgacgagcaaacaggaaaacctgctggattggctgcgcgatgcccacgccatggagcaacaggccgagcagatgctgaaagcgcaagccgcgcggctggaacactatccgcaactgaagacgcggatcgaacagcacatcgaggaaacccatggccagcagcgtctgctcgaggagtgtctgaagcgcctggacagcagtccgtcgacgctgaaggacatcggcgccaagctgatggccttcggccaggcggtggctggcatgacagtcagcgacgaagtggtcaagggcgccatgagcggctatgtgttcgaaaacatggagatcgccgcctacaccgtgctgatcgccgccgcccgcgaggtcggcgacgccgaaacccttgccgcgctggaacgcatcctgccccaggaacaagccatggcggactggttgcgcgaccatctgccggaactcacccaggccttccttgcccgcgactctcagccggacaccgaggccaagcgatgaacccaagggtgatcggggcgtgctgcgggcgatcggacccgcaggcgcccctgctcaagaccctgactttcgccatactgcacttcagcatcgccttcggcgtggcctacacgctgaccggctcggtgctgaccggcggcctgatcgcgctgatcgaacccagttgcaacaccgtggcgttctatttccacgagcgtgtctggcagcgcttcggcgcccggccgcgccgggagagcggacacggccacggcaatctggtgccgtcggaacgccgcgactgagccggcgcgcttcgagggcgacgaaagccgccaccgggtgcagcaagccggtggttcgaggagcgacgagggtctcgcgtgtccgtaggcgcgtctccttggaaagaagatttcctggcctcacccgcgtttcggcaattccgtcgaaatcgtcggttcgcgatggagaaagcgaggcctttgccgtttcgtttcgcctgcctggaagaggcgcccgtccatcgttgcatgtttcgctcgccggtatcgtcgcggctaaggtcagagtaacgatccaccctggagtatcagccatgactacgccccgcatgattgccaacagtttccgaaattacctggctggctacgactgcctggtttccatcagcgatacccatgaagtcaccttgcaattcagcagccatgtcaatccgcaagaaaacatcaccattccaggagtcgccctcgatctcctggccagtgacgaggcggtacgccggatgagcgaagtccttcacgacgagttcgccctgctcctcgccggtgcccgccgtacgccgcggatcgggcgcgcctgttcctgagcggcccggctcagtgatagccggcatcggcgctcttgccgcgaaatacgtagtagctgcaggcggtgtagccgaggatgaagggaatgatgaacggcgcgctagccggccaaggccggctggagattttcctccagcagctcctccaccagccggcgcagtgccggatggcgctcctggcccgcttcgcgcaacctccggtaacgccgcaactggcgggcggcggaggtctcttcgagtaacccgcaggcatgctggtaggcccattcgttgccctggcgggcctgcggccggcactgtcgccaggccatttccagccagtccccggcacctacgcagcggccttcgacgagatagcggccggcgcaaccgtaacgcagcgcctgccagtagttttcctccaggcaggcgtcgcgcgcgaccggcaacgcacgcgggtccgcgcccagcgcttcgcccaccagcgccctgaacagcccggccaggctcagcgcgtcggccaggcgcgggcaggcgtcgcagatacgcagctccagggtcggcacatgggatgacggccggatcatccaccagacctggccatcctcgcggatgcagccggtctcgcgcagcagcgccaggtggcggcgataggcgtcctcgtcgggcaaggcaggaggaatgttcatcctcggccactcgccgcagagtgcccgtcgatagctcgccaggccgctgcgccggccgccgcggaacggcgaggatgcgctcaacgccagcagcagcggcagccacggcaacacgcgctggagcacagccatgcggtcgtggctcggcggtatctccacatgcacgtgcaggccgcagaccaggctgcgccgggccacccgcccctggtcctcgaacaggcgggcgaagtgcgccgccgggttgcttcgcgcccgccgccagtcggcgaagggatgggtgccgacgcagagcgagcgcaggccgaagtccatggccagatgcgccaggcgttgccgggcctgaccgtggaagcgcgcggcctcggccagggtggagaacaccgggctggccacctcgacctggcattcgaacatctcctcggcgaaatgctcgccgagcgtgtcacggcaggccgcgacgaatccggcgggggcggagcggacgatgtccaggtcggaggcatcgagcaggaagaattcttcctcgatgccgaagcgaaggccgctggcggccaggtcgtgggtcatcggcgcagctcccggggattgtctcgggaagacgccggagtgccgtcgaggttcgttttttccgccgtgaggttccccggcgcgccgccgatcctgccagtgaaacctttttcccctggtgtcactcgcacccatatgtgtggtcgccccggccgcccccgcaaacccacgacaaggaacgcgacatgagcctgtcttcgcccctccctgcctccagtgcaagcccttcgcccagggtccgcgacctgtaccacgccctgctcgacgagccccgcgagcacctcgaagccgccggcgagttcctcgaccagcaattgagcctggccgccacccatgacgacgacctgccggaggaccccgccgattggccggcctggctcgacgccggggcccggcgcaccgccgaggcgcatgccgaatacctccgggcacgtcggcgcggcgaagggcgacgctacttccaggttccctcccaggcgatgcacttcattcgcagcgtggccccgaccaagctggtcgacggcgcctggctctatgggctgttgccgcatcatggcgaggaacgcctgcggccgctgctggagaccttcctcgaagaactcggcgacggcgtcccggcacgcaaccacgtcctgctctaccggcgcctgctggccagcatcggcagcgaggaagtcgaaggcctcagcgacctccactacctgcagggcacccagcaactcgccctcggccacctcgccgcggactacctgcccgaagtgatcggctacaacctcggctacgagcaaccgccgctgcacctgttgatcaccactcaggagctgcgcgagctgggcttcgacccctactacttccagttgcacgtgaccatcgacaacgccgccagcgggcatgcgcgcaaggccctgcgcgcgctctacgacaacctgccgcagcttggcgggcgcgcggccttcctcgaacgggtgaggaacggctaccgcctgaacgaggtcggcctgagcactacgcaggtaatcgacggcttcgatctcgaggaagaattgctggccatgttcgagcgcaagcgcccctacgccgccgggatgcattcggatcgttgccggatcggcgggcgcacggtgaaccagtggctggcggtgcctgggcggttcccggcgtttctcgcctgcctggaggaagagggctggatccggcgccatgccgatccgcgcggcagccgcttctggaacctgatcgagggcgaccgggcggcaatgttcggagtcttcactccctacgagcagcagttgctgtacgactggatcgctggcgactggcaagcacccgctccggcggacagggacccgcttgcaccgctggcggagccggcgacggcgggcggagacgtggacgccgagcaggtcgcgctgcggcgcgagctgctgcggctatcccccgagcagggcgtcgcacgccttctcgaactgatggccccgcacctccaccacgggcccgccggtctccttgccacgcggatgttcagccagcgctggagggccgcccatgcccagcctgcatgatccgcgcctggacgtcctggtcagcctcggcaactggttgcgaggccaggactaccgtttcgtcaccgtcaccccggctacccatgagcgcgtcaacgcccgcccggaaaaccgcatggcccgggacctggccggcatcttcggctggagccgggcattcgccggggaaagcctgccggccgactggctgacccttcttgccggcgccgacctgatccgccgcgaggcggacggctggcgcagccaggtgcgcgtctccagcctcggcgagcaactgttcgtccattcggccttccctaccctggccgccgacgcggtgttcttcggccccgacacctaccgcttcgaccggctgatccgcagccacctggcatcgtccgatccggcacgcatccgccgtgcggcggatatcggctgcggcgccggccccggcgcgatccgcatcgccatggcctgcccggacgccgaagtacacgggctggatatcaatccggcggcgctcgacctggcgcgggtcaacgcggcgctggcgggggtcggtaacctgaccctggcgcgtagcgacctgctgagccaggcgcccggtcgcttcgacctgatcgtggccaacccgccctatctcctggatgtctcggagcgcgcctaccggcatggtggcgggatgctcggcgccgggctctcgctggcaatcgtcgatgccgccctcgagcgcctggaagccggcggcagcctgctgctgtataccggcgtggcgatggtcgaaggcggcgatccgttcctcgcccgcatccgcgaacgcctggcgtctcgggagtgggactgggactaccaggaactggacccggacgtgttcgccgaagagttggacagccccgcctaccgcgaagccgagcggatcgccgtggtcggcctgcgggtcactcgtcccgcctgaggcgctccaggccttccaccagatcctcgttcaggcgctgccagcgctcggccacctcggcctcggccggaatcaccgcgaggacctcgccatccacccactcccagggcaggcacaggcgttccgcctcggcccggctggcggcgcgcacggtgcgggcgaaacgccgccagccgcgcatgtgctggatttcgtaggtggtcatggctcctccggaagacagggacgtttgtctttcggcgctccccgcgtcttccggttcaaggccctggatgggcggtcgcggaccgcccggcacgccacctgaaccccctcgcgcggggccggtccagactcctgaacgccacagaaaagaggtgcccgtcatgacccgcgaaatggctcggctactgatcagtcccaccaatgcctggcctcgtttgcgccaggactacgaccatcaccctttcgccttcctcgttccgctgttgctattgccgctgctgccggcggcctgcctgttcatcggtactacccaggtcggctggtcgctgccgggcaacgacagcgtgcaacacctctccagcggcagcgccctgctgctggcgacgatgtgttacctgggcttcgtcgccggcgtggtgatcatgggcttattcgtacgctgggtgctgttccgcacgccgtcgcgccccagcgtaccgggcagcctgaccttcaccacggcgatcgccgtgcccttgatgctcgccgggatcgtcgccctggtgccctggcggatcctcctgctgctggccgcggcggctgcctgcgcctactcggtacgcctgctgttcaccggcctgccgctgttcatgcgcatgcaggagcggcagacattgttctacgccttctgcatcctcggcgtcggcttcctgaccctgctgaccaccgccttcatcttcatcgagttctgggggcaaagcctggccggcagcggcgagtacctgcgctgaggctcagccggccttcagcgtgccggtcaggaacaggtacaactcttcctggccgaacggcttggccagcttgggcaactgtgccgccgcgccttcgatcttttccgcgaagccggtggccagggccatcttcagcggccggccctgggccatgacccgctccaccaactggctgccgttcatccgtggcatcgcctggtcggtcaggaggatgtccagctccggcgtcgccgtgagaatctccagggccaggctgccggagtcggccttgagtaccgagcaaccgaggtcctccagcatcgccgcggtgttgttcaacaccagcgggtcgtcgtccaccaccagtactcgacaggacaagcgcacccgctcgctttcgctgggcgcctgcggcgtcgcgccattgcccgtacgggcgctttccggggttcgcgggacggcgggtatccagatgttcgcggtggtgccgacgcccggctggctctccagggtgagccggccgccgagctgctcggcgaggccgtcgacgatcgacaggcccagcccggtgccacgcccaattcccttggtggtgtagaagggttccaccgcacggcgcagggtttcctcgtccatgccgctgccggtgtcgctgatgctcaggcagatatagttgcccggtgcgaggcgatggggattgtccgccggcacccgctggttgctcgcggaaaagacgatgcgcccgccgttgggcatggcgtcgcgggcgttggtggcaaggttgatgatggacagttcgagctggttggcgtcggtcaggccgaggtcgagatccaggggaaagcgcgtctcgatcgatacgctcggtcccagggaatggatcagcaggtcggtcatcccgcgcaacaggtcggggatcgcgcagggctgtggatcgagacgttgcttgcgggcgaaggaaagcatccgctgggtcaggttggcgccgcgctgggcggcctccagggcgttctgcaagaggtcggcggtgcgctggtcgccgggcaggcgtttcttcagcagcccgaggctgccgatgattaccgtcagcaggttgttgaagtcgtgggccacgccgccggtcaggtgccccagggactccatcttctgggcctggaacagctcctggcgggcccgttccagttcgcgttcggcttcgatccggtgggtgatgtcacgggttaccttggcgaagccgatcagccggccatcgctgtcgcggatcggatcgatcaccacgttggcccagaagcgactgccgtccttgcgcacccgccagccttccttctcgaaacgcccttcgcgttcggcggcggccaggccgcgggccggctcgccggcctcgcggtcttcgggggtgtagaagcaggagaagtgccggccgatcacctcttccggcaggtagcccttgatccgctgggcgccgaggttccagttggtgatccgcccgcggtggtcgagcatgtagatggcgtagtcggtaacgctctgcaccagcaggcggaactgctcctggctgcgccgcagcgcctccttggctgcgcgcccttcgctgaggtcgtggatcagctgggcgaagccgagcaactggccctggctgtcgcggatggcgtcgatcaccacctgcgcccagaagcgcttgccgttgctgcgcacccgccagccctcggtctcgaagcggccctcggcatccgcctggcgcagcgcctgttgcggaacgccggcgtcgcggtccttgcgggtatgaaagcaggcgtagtcgcggccgaggatctcgctcgcgtcgtggccgaacaggcgcgccgcgccggcgctccagctggcgatacggccagcgctgtccagggtgtggatcgcgtagtcgtcgaccgcttcgtcgagcaggcggttgcgcgtggcctggttcaaggggactttcggttttcttgtggttttcatggacgtgttcactcgtcggctgctcgacccgggctgcaaggcacacccagcaaggtagtacgaagaacgtcttccggccgctcgctggctcgccccaggaacttggccgacctttcggaagaccccggcgcggccggcgaattccattcgccggaaccttgtccggagtatggctttcgatatgcaggtagggacatctcctttccaccgcaccgaccccggagttcccatgcgcaatctggaaaccgcaaccctgaagctggggatattccatccccacgacagcctgagccaggcgctgatcgccgccgccttgcagcggcagatcgaagtcagcgccttgcaagccgacctcaacagcctgcaggcgcgccccgggctgcgctgcaagccagccagcctggcgtcgtcgatcgaggtcagccaggcggcggccggtctcgacctgctgttcgcgccgttgtccgactacgccgccgaagccttgccgccgatctgcgccgcgctgatcgatggcgccctgcgcgccgaggtaccgcgcctgtttctgcttggccattggcaatggctggtggcgccgcgcgacgccggcgaggagcaactgggtgccgggctcgagcgcagcctcacggtcagcggcctggactggacgctggtggaggtcccgagccttcccgccggcctgcgcatcgacgatttcagccgcgccggcgacgtcgcggaagtggaggccgccagggtgttcgcctgcgccgaagcgctgctcgacgaagtccgtctcggcctgcacaagcgccagtgcctgcgcctggcgccctgaggagaacccgccatgtccggccccgatactctcagccaggccttcggcaccttactgctggccctggccttcagcgccttcatcgttttcgttcgcggctaccgcccgggcggggtcagcggcgcctggtacgacctggtgctcgccttcgtcgcggtatggctggcgttctggcccgaagccggcgtactcgcacgctcgccgagcctggccaatgccctggggttggtcttgcaggtcggcgctaccctgctcggctgcctgctcggttacggggtggcaaggggattgcggcgggcgatgcgggaaacccggcaaaaaagatcggcttcttcgccaacgagccggcgaggttcctagaggaaatatcaagaaaatccatataaccatatgggcgaaaagttctttcgaatgcccataaggagcgccgaacgggcttttcgcccgtcatgatcgcactccgacatgagcgttctgcacgacttcttgcattctgcatcccgcgcctcatgcgggatacagcttatcccgcagattctggatgtggccggtatttcatcggcgcggcgcctatagttatccctaccgttgtacgtatcgacggtttctctctgattcaggctaatcccgctccagggacggagtggatctttttcttgcgcttcgcgaactggggagacctgaccagatgaacctttcctacctgtacctgaagaagatcctcgaggaggaactgcgcgaccacgactgccagtgccaactgaaccccgacttcacggtgaccatcagttgccgcgtcgacggcccccacggcgcgctctacatcgtgcccaacagcgacttcctgaagagcagcagcttcagcgacctcagcgccttcatcctcaacctgcgcgaggaaatcaggcgcttcggcgagttcgaggcggaactccagaccggcaccggctgagcccctccccccttctttttccccctcccgccgtcagggctgctggtagtgtcccggcgtggtgcccggttcatgggtacgctccaccttgctgacctggatatcgctgatcgcctcggcgtcgtgcggtcgatgcagtgcctccaagtggcggcgggcctcctcgcggctgagggtatccgcctcgctgtgcaattcgcaggtcatcggctggtcgtcgaggatgtagctgatcaggaacagatggctggccatcgtctcgccctcctctcttcgatgggccctgcgccaggcgcagggcccatggctatcacggcaggttcggcggcagttcggcgtccagcgcagcgtcctgccgcgagtcgtcgcgctggcgctcctgcaggcgctgcaggcggcgggtcaggtgctgcacctcttcgcgcagcaactgcaactcttctcgcggttgattgagcaggcccttgacatggcaatgcccactcaacccgcggctgaccagcaggccgccggcgaccgccttgcaggcgccgggcaagccaccgcgggccaggccgaagccggccaggaccagtccggcgccgatggaagcgagtcgctcgccgcgctgcaggttgtgcggcaggccattggccgtcgaagtcggcaggtattcgttcatggaattctccttgcttcggttatcggtcaggcttcgtcgtccggcggttgcacgaggaactcgaccagcgtccgccggcaagcctcgatgccctcttccaggacgatctcgaaaccgtgggtgttctcggtcggaatgccgatgcagccgacctgcgcggcctcgccgtggctcagcagcgcgctggcgtccgaggcgaagtccaccagcagcgccgcctgcggctggtactggcagcgttcggcggcgcgcaacaggcggtcggtgacatggcggctgtaataacccttggagtcgccgctgttgacgatcgggtcgcggcacagccgggtgccgtattcggctaccgttggaccgacttccaccgcgatgctgatgtcgcccggcagtcggcgcgcggcgaacagcgcgccggcgttactctcctcctccatggtggtgagcaccaggtagaggtcgccgtgcaactcatcgcggcgccgggcgatctcgcgagccacgccgagcactgcgagcagcggtgcgcggtcgtcgaggaagtgcgcggcgacgcaatcctggaagtacaacgggcgccgccacagacggttgagcaccacgcgggtacccggtcgcacgcccaggttcgccagctcctcggcgctgcgccgggtgaccacgtgtacgtcgcgccagtgcaccgcgcccgagagcacgtcggagccctgcggcgactcgccggtagcatgcatgctgccgtaggacagcacgccgtcgagtaccgcctcgccggccaggatctgtaccggacagacgccgaagctcaccggctgggcgccgccgagcgccactacgcgcagggtaccgtcggcctcgacgcgcttgacgatcatggcgatctcgtcgaggtgtgcgagcagccgcaccgcggcccgccgcgcctgctcgcgcggcaggtgcggcgggctgatgcgcgcgaccaggttgccggcggcatcgctgccgacctcgtcgcaacagccctcgagttcccgctggcagatggccctgacctcgtcttcctggccaccggggccacgtgccagcaggagttcctcgagcaaggcgcggtcttcttcgcgcatgcctcaggccgcccgtttttccaggcgcgctttcagctctttcttgtgctgctgcatggcctggccgagttgcttgagggcggcggcgtcgagcaattgccgggcgcgcgggaatagttcgccctcttcctcctcgatgtggtgttcgaggagttccttgagcaccttgacccggccggcgaactgcacggtatccgggcgggtgcgcttgaggtcgggaaggaccagggaatccaccgtgcggtgttcctccttggcctcgtagtacattttcagctcttccttgccgccgctttccctgatcgccggatagaagatgtcttcctcgatggcggtgtgcagcaccagttccagctccagcctgcccagcagctcgctgcgcttcttcagcgcccgttcggtggtctcgctgagttcgttgagcagtttcttcacggtctcgtggtcatggaccagcaattcgatggcgttcatggtcgctcctcatcggtttgttatccgagtgctccggcactctctctggctgagcgcgcgttcctccgccgagttcagtcgcgaggacgggcggtcgccgcacgcgggccggcgaccgcccagatcagcacgccgagcaccggcagcaccgcgatcagcaacgaccacagggctttcgaattcacgctgcgatcgctgcggaacacgctgacgaaggcccacaggtcgtagaaacccaccagcgtggccaggccgatgagcaggaaagccagggactggctcatggcgcgctcctcctcgcggggtcggctcaggcgcgggcgtcgcgcagggctcggacccggtcgtggtgacggagtacgccctggtattggcgctcgatcacctggtggatctccgccggcagcgatttttccagcgccgcctggtagcggtgcttggcgacatcctcgccgcgctcgcattcgttgagcaccgcctcttcgtccttgccggtgaccagtgacttcaggtcgacccagcgccgatgcaggtcaccggcgaaactggtgctgtccttgggtttgccacccagttccaggacgatccgctccagctcgtcggcggccgcggcgcagtcgcggctctgctccagcatcgccgccttcaactgcgggtcgcgcaggtcctcggcgcaggcgtggaaaccggcctcgccatccttgctggtttgcagcaggtcgttgagtacgtcgagggtgtcgtcgaggttggtctggttcatttcgctctccttggcccggagctgtccgggatttctcgcgtctgtcggcgccggcgcctgccggcacggaacgtgggcagcaaccagcacccacggaaggtgggaggctcgccgtcgcggagcgttcagaaagccggatggatggtggcgtaggccggggtgatgctgagacgttcgccgaccaccatctcggtgatccagtccaccaggatcgaggtataggcgtcctgcgccgcctcgctgctgagcgcatggtcggcgtggtcgatgatccggtgggtcagcgaatgggtctgctggaaggcggcgcggaaactcatgatggtcgagtgcggcacatagctgtcgaactccgactccaccagcagcacatcgccgcggaatcccgcgcaggcctgcagggctcggttgctggcggccgggatcaggctgctgcggtattcgctgagatcctcgcggtcgagcagcagcttgggcgtcagccaatcctcgtcgcggtagatcgccggcacccgcaaggccagccagcgcaccgcgcgcaactggctgaggatcgccgccaggtagccgccatagctggtgccgaccaccgcgatcgcctcgctgtcgatggccgggtgggccaccagccggtcgtaggcggcgagcaggtcctgcaggttgtcctcgcgcgtcaccagtgcctggcgcccgctttccgcgccgtggccgcgaaggtcgaaggtcaggcacacgcagccgagcccggcgatgccctgggcgcgcttcaggtcgcgctgctggctgccgccccagccgtgcacgaagagcacgccgggaaccttcgcccgggggctgaggaaggtgccttcgatccggtcgtcgccgaccccgatgcggatgcgttcgctgttcgccgtcatgcctcccccgtcatcgcatacttgagcaggaagtcgccgtgttcgtcgggaccgcggtagatcacccggctgttgtccggcaggcgcttgtcttcgtggatctcgaacgacgcggcgcgcaccgcgggcagccccggatcggcgcggaaggcttccagcgcggcgatctcggcgctgctcgcgccgccgacccgccaggactgctcgagcacgccgaagcgctcccgaccgttgccgtcccggccctgggcaatgtcgtagttgcgccgcgaggcgaagcagccggggaagaagatcgccgcggcggtgtcgaagatccgcgcgtactcgatggcctggcgcacctcgcgggccaggtccagggccagcagctcggcgtagccaccgcgcgccaccagcaggtcggagccggcatagaccagttcgccgcgcgcgttgcgggtctggtgctggtgaccgtggtagctcagcaggaaaccgttgacccggagctggccgacgctgtgggtgacgatgctctccaggttgacttccagtaccaggccctgcgccaactggcgctcctccagctcgccgagccagccgtccagttcgtcgaggtcgtgcgccacgtactggccgaggccgccacaggcctccgccagcttggcccgcaccggtccttcggcgagcatgcgagcgccggcgcggtgtgcgtcggccaggctgaagacgctgacgccgttgagcacgacgtcgcggaccttctccgcgaacagcgggttccagccttccggcgccacgccgccgcgcggcagcggatggacgatggccttaccggcgatgaacgcgtgctcgacgaaaccgccgagcagatcttcgtcactgttcacgcccaggcgcacggcggtctccctgccgaccagggtgcgggtcgggaccaggtagagggggcctcgctggtgcaattcgggttcgtagcggccgccgaactccagcttctggacttccgccagccagcgcgccagggccaggttgccctgcacttcgtgttcggcggccgcgggatcgacactatgggccaccaccagtctctgccgagggtctgcgctcatgttccgctcctcctggatggaaaccgggcattcagggctccggtatgggcgagaggggctcttcgttgggctgttccatcggaatctcttccgggaattcctgggggacgtggctttcgtggtcaggaaccggatattcgtccggatccctcgaggggttgcgtggagtggtcgctgtcgcgcccgatgatgcagaagtgggaaaacgcatgtccgcctccatcgtagggatgacttctagatggagggggcgaagacggatttggttcggaccatgcgtcggaaggccgggtcggcgactgaccgacccggagctgaaacagcctgctcagcgagccaggctcatggtacgcagcttgccgccggcgaccaggaccttgcgatgagtgagatgctggttgtcgctgtcgcggaacgtgagcaggtcgatgcgcttgcggaaatagtcgctgtcgcgcgtctgcaacggcccctggtcgatgatcaggtcccggcggatgcgttccagcacctggttcagcaacagcgggctgctctgctcctggccggagatcgcccggctcatcaggcgcttgccctggttattacgcaaggtcaccagcaacgcgccgtcagggcgaggttcgcaactgacgcgcacatccttgaaatgctcttccaggtactcaaccacgttttcatcggtatctagcattgctggcctcctgtctcatcagattctttgacgccggtaatcaggcgcatccctttcgagcagaaggcgtaccaattcttcttgaaaattaatttcttataaatcaataggttgaaaaacaaagcggcgaattgatatttgcaatttgcaagaaagcccctgccgagccttgcattcggcaacccgttgcgcccgtcgtctcgcctgcaaccccctggcgcggcttctcgcaagccgagccgccggtaaaaaaaactaaacttccggcgctcccctccggtcacccctagcaaggacttcgcccatgccacggcgcgacggagtccgaccgaccaacgccaaggacaacgtacgaccggaggatgacatgggacattctgttgcaggcgtttgcctggaagaacccgcggtactgaccgcttttccgtcgctgctgcacccgcaggacccgccgcaacagagggatcggatactcttcgttaccgccgagctcagcgatttcgtcaaggtcggcggactcggcgacttttccgccgcgctgccgagggtcctcaagcgcgagcattcggtgcgagtcctgctgcccggctatcgccaggtgctggagcgctgccgcgacttgcggatcatcggcagcctgcccggccgggcggcgatcccgccctgcgagatcggcctggtgaccctcgacgacggcctggaagtcatgctggtgctctgcccgctgctctacgagcgcgagggtacgccgtacatggacgaccagggcaacgactggccggacaaccacctgcgcttcgcccgcctgtgcctggccgccgccgagatcgccggtggacgcggcgcccagggctggcaaccgggcctggtgcacgccaacgactggccgtcggcgctgacgccggcctacatggcctggaacggcgtgcgcacgccgagcctgtttaccatccacaacctcgcctaccagggcctctgcgacctgcaatgcagcgccgaactgggcctccccgacgaagcgctgagccacgaaagcatggagttccacgggcgcctgtcgttcctcaaggccggcatcgcccatgcccaccacatcaccacggtgagcgagacctacgcccaggaaatcactaccccggaatacggctgcggcctgcacggcatcctcaagtacaaggtcgagaagcgtcagctcagcggcatcgtcaacggtatcgacgatagctggcaaccgcactgcgatccgcacctggtcgcctgcttcagcgcccgccaatgggccggcaagcgcgccaacacgcgctacgtggaggagcgtttcggcctggagccgggcaaggggccgctgttcgcggtggtctcgcgcctggtgcagcagaaaggcatcgacctgaccctggagatcagcgatgccctgctccaggccggcggccgtctggtcagcatcggccgtggcgagccgaacctggagaaggccatgctcgaactcgcccggcgtcatcccggccaggtcggcgtgcacatcggtttcgacgagaccgaggcccgccgtatctacgccggcagcgacttcctgctcatgccctcgcgttatgagccctgcgggctcagtcagctctatgcgcaatgcttcggctcgctgccgatcgcgcgttgcaccggcggcctcgccgataccatcgtcgacggggtcaccggcttcctgttccgtgaggaaaccgcgcagagctacctcgatgcggtgatgcgcgcgatcaacgtctaccactgtccctcgctgctcaacgccatgcgctgcaaggcgatggccgcgccgatgttctggagcgactcggtggagccttacaaccgcctgtaccggcgcctgttgaggaataccgctccggccctgcgcggggtacgccagtgatggcgatccggcgccgcttcggcgcccagttccaaggcaacggccggacctgcttcggcctctgggctccggacgcccgtgaggtccgggtcgagaccgccgacggccgcgactggccgctggaaggcagcgacagcggctggttcgaggcgaccctgccctgtccgcccggcacccgctaccgttaccgcatcgatggtcgccccggggtgccggacccggcctcgcagttccagcccgacggcgtgcatggccacagccaggtgctggaccatggcgcctacgcctggcgcgtcgacgagtggcgcgggcggccctggcacgaagcggtgatctacgagctgcacgtcggcctgttcggctcctacgccgaggtcgagcgcttccttccgcgcctggtggaactgggcgtgaccgccgtggagctgatgccgctgggcgagtttcccggtcgccgcaactggggctacgacggcgtgctgccgttcgccccggcgtcggcctacggcacgcccgagcaactcaagcatctgatcgacagcgctcacggcatgggcctgatggtcttcgtcgacgtgatctacaaccacttcggcccggacggcaactacctcgcgcagtacgccgccgcgttcttccgcgacgaccggcagacgccctggggccaggccatcgatttccgtcgcggcgaagtccgcgagttcttctatgagaacgccatgatgtggctgctcgactatcgcgtcgacggcctgcgcttcgatgccgtgcacgcgattcccgatagcgcgttcctcgtcgagatggcccgccgcctgcgcggcgccgccggccccgagcgccatgtgcacctggtcctggagaacgacgacaaccgcgccagcctgctgcgccagggctacgacgcacagtggaacgacgatggccaccatgcgctgcacgtcctgctcaccggcgagaacgacggctactaccaggactaccccgagccgctgcgctgcctggcgcgctgcctggccgaaggcttcgtctaccagggcgaagccaaccgccacggccggccgcgcggcgaaccgagtgccgacctggcgccggacgccttcgtgctgtttctgcaaaaccacgaccaggtcggcaaccgcgccttcggcgagcgtctcagcgtcctcgccgaaccccaggcgttgcgcctggcgatagcgctgcaactgctcgcgccgatgattccgctgctgttcatgggcgaggaatgcgccgcgcgcgaaccgttcctgtatttcaccgatcaccagggcgaactggcggacgcggtccgcgagggacgacgcaaggagttcggcgagttcggccgcttcggcgagggcgccaccctggcttcgctccccgacccaaacgcggtggagaccttcgagcgctcgcgtcccggcctggccgattgcgacccggcctggcgcggcttctaccggcaactgctggaaatccgtcatgaacacctgatcccgcgcctgcgcggcgcccgttcgctgggcgttaccaccatcgccggcgccgcgctgtcggcgcgctggcgactcggtgacggcagtgactggcgaatcgacttcaacccttctccgctcgaagcggaagtcgagccgccggcggccgccacccgggtgctgttcctcgacaacctcgcctgtgccgagtatcgccgcggccgcctaagtccccgcagcatcgcggtcagcctggagcccgcccatgagtgacgcacgcctggccgaactggccgccgccgtgggcctgcaactcgactggcaggacgccaacggacggccgcagcgggtcgacccggaggtccagcgcggcctgctggaagcactcggctatccggcgcagagtccgcaacagatcgaacagagcctggccgcgctggcccggctgcgcgaggacagcgccaacctcggactgctggtcggcgaatgcggccagccgctggagcaagcgctcggccccgccggcaccccgggcgagctggtctacgaggacggcacgcggatcgccctgcgcctggacgccgaaggccgcctgccggcgcaggcccgcagtggctatgcgcagctgtcgctggagcagcgggaatgggcggtggcgatggcgccgccgagctgtccgtccctggccagcctcgccccgggtcgctcgcgtcgctggggtctggccgcccaggtctatgccctgcgccgccccggcgacggcggcctgggcgacagcgccgccctcgaggacctgctgcgcagcgccgcgcggcatggcgccgacgcgctggcgatcagcccgctgcacgccctggccgaggccaacggacatgcctacagcccctactcgccgtccagccggctgttcttcaatgtcctgcacgccgcgccggcgaccattctcggcgcggcggcggtggaacaggcgatccgtcgcgccggcctggccgcggagatggcccgcctggagagcctggagctgatcgactggacagcggcggcggacctgcgcatgcgcctgctgcgccaactccaccgcgacttcaccgagcgcgccagtcccttgcgccacgacctcgccgaattccgccgcgaagccggcgaggccctgctgcaccactgccgcttcgagaccctgcaggcgcacctgggcgccggccccgactggagacgctggccggagccgctgcgccgccccggcgagccggcggtggccgcattctgcgccgatcacgccgaggaagtggacttccgcgccttcggccagtggctgacccaacgctgcctgcaacatgcccagcgccaggcgcgcgaggccgggatggccatcggtctggtcgccgacctggcggtgggcgccgatggcggcggcagccaggcctggtcgcggcaggaagagctgctcgccgaagtaaatgtcggcgcgccgccggacatcctcaaccagtccggacaggactggggcgtttccgcgttcaatcccgaaggcctgcgccgccacggctaccgggcattccgcgagatgctgcgggccaacctggcctggcccggagggctacgcatcgaccatgtgatgggcctgcaacgtctctggctgatcccgcgcggccagccgccccacgccggcgcctacctgcgctacccgcaacgcgagctgctgcgcctgctggcgctggaggccagtcgcgcctcggcgctggtcatcggcgaggacctcggcaccgtgcccgaaggcctgcgcgaggaactggcacgccgccaagtgctgggtacccgcgtgctgctcttcgagcggcgcggcgaacgcttcgtgcccccggcgcaatggccggcggacgccatggccaccaccagcacccacgacctgccgagcctgtccggctggtggcggggccaggacatccactggcgcggccgcgccggacaccgcagcgccgaggaatgcgcggccgacctggaactgcgcgccgaggagcgccgggccctggccgccagcctcgaaccgccggtcgatcccgaccccgccgccgaagtaccgctggacgcctgcatcggctatgtcggggcaacccccgcgccgttggtgctactgcccctggaggacgccctgggcagcctggagcagccgaacctgcccggccccggcgacgcccacccgaactggcggcggcgctggccggaaaacgccgcgcagatgctcggaacgccgcaggtcgaccggcgcctgcgcctgctcgaacgcagccgccgggatgccgaggaggccgcccatgattgagccccgcgctaccctgcgcctgcaattccacgccggcttcaccctcgacgatgccctgccctggctggactatttcgccgacctgggcatcagccatctctacgcctcgccgctgttccgcgcacggcccggctccagccacggctacgacgtggtcgacccgacccggatcaatccggaactgggcggcgagccggcgctgctgcgcctgatccaggggctgcggcaacgcggcatgggcctgctcatggacatagtgccgaaccacatgggcatcggcggcggcgccaatccctggtggcaggacgtgctcgaatgggggcgcgagagtccctacgcgagtttcttcgacattcagtgggaatcccacgacgccgcgttgcgcggccaggtgctgctgccgttcctgcgcagcgactacggcgaggtcctggctgccggggagatcggcctgagcctggaccgcgaggccggccgcctgctggcgagccacggcgagcagcgcttccccctctggccgggcagttacccggagctgctggaagacagcggcgagccgcgcctgtcagccctggccggcggtttccgcgagtgccggcaggaccgcgaggccttgcgcgagatgcagcgtcaactggcggctgcgctcgccgagagcgctccgcgcgcagccctccagcgcacgctgggcgaactccaggaacgccacgaggaggctcgccaacgcctgcaccgcctgctcgaggcgcagcactaccgcctggccagttggcgcaccgcggcggacgacatcaactggcgccgtttcttcgacatcagcgaactggtcggcctgcgggtcgagcgcggcgaggtgttcgaggccgtgcacggcaaggtcttccagttgctcgaggacggtctgctcgatggcctgcgcatcgatcacgtcgacggcctggccgatccgcgcggctattgccgacgcctgcgccgccgcagcgagcggatccgcgcccatcgcggcggcgcgccgatgctgctgtacgttgagaagatcctcggtggcgaggagcgcctgcccgaggattggctgtgcgacggcaccaccggctacgacttcatgaaccaggtcagcctgttgcagcacgatccgcgcggcgaacgaccgttgcgcgaactctggcagcgggtcagcggacgcccggaggcgtttctcgacgaggtctaccaggctcgccaactggtcctggcgggaagcctcgccggtgacctggagaacctcgcccagggtcttttgcgggtggcgcgggccgacctggccagccgcgacctgaccctgggcggtatccgccgcgcgctgttccagttgctcgcgcgctttccggtctaccgtacctacgccggggcctgcggtcgctcggtgcaggatcgcgaggtgttccgctatgccgcagaggcggcccgcgaggatctcgacgaagccgaccgggcggtcctcgaccatctcgaacgctggctcggcgggcagccgctgtgcgagctgccgcccggtccgctgcggcgcctgcgcggcgagttgctggcgcgcttccagcagttgagttcgccgaccgcagccaaggccgtggaggataccgcctgctatcgctcggcggccctgctctcgcgcaacgacgtcggcttcgacccgcagcgcttcgccgcttccgccgaggaattccatgccgcctgcgaagccaggcgcctggccagcccgcgcgccctgctggccaccgccagccatgaccacaagcgcggcgaggacgcccgcgcccgtcttgcggcgctcagtgaactggcgccctggttcgcgcgtaacgtcgagcactggcaaagcctggccacgccgttgcgccgcgacctcgccgaggggccggcgccgagtcccggcgacgagctgatcctgttccaggccctgctcggcagttggccgctcgacgcgccttgcgacggcgccgccctggaccaagcgttcctcgcgcggatgcgcgaatggcaatgcaaggccttgcgcgaagccaagctgcgcacgcgctggaccgcgcccgacgaagactacgagcgcgcctgcgccgactatctggaacagctcctgcgcgcgccgctggcccaggccctgcgccagtcgctgggcaacgcggcggcgcgactgatgccggccggggccctgaatggcctcgcccaatgcctgctgcgcctgacctgcccgggtatccccgatctctaccaggggcgcgaggactgggacttcagcctggtcgacccggacaaccggaggccggtggacttcgcccggcacgccgccgccctggccgcgccgacgcccttcccggaactgctggagcactggcgcgacggtcgcatcaagcagaccctgatcgcccgcgtgctggggctgcggcggatgcagccgggcctgttccgcgacggcgactacctgcccctggaggtcagcggcgagcatgccgagcgggtcctggccttcgcccggcgcagtcgtcacggttgcctgctggtggtggtcccgcgcctggcctgcgccctgctcggccacgccacgcagccgcaggtgccggccgaggcctggggcgacacctgcctgctgctgccgccgagtctctccgaatgcacctacagcggcctgttttccaccatgccgctgcccagcgacgggcacctgagcctgtccgaagtgctcgccgactttcccgtcaacctgctttaccgcctcgcccaggaggacaccccatgagcgccgacgaaaaacgcatacgagagttcgcctaccagatctgggaatccgagggctgccccgacggccaggccgaacgccactgggccatggcccggcaactggccgaagcggaagccgccgcggcggcaccgaagaagacccgcggtcgggccaaggccgccaaggaaaccccggccctgctgcaagcgccggccgccaagccgcgcaagccgagggccgcgtccccggcgcggcccgccagcgaaaaaccggcggcggccaagccgcgcagccgccgcaagcccgaagcgggcgaatgaggagtccagtgcatgagcagaaagcgtagccccgctccttcgcggatcagcgaagggcaccccttcccccttggcgccacctgggacggcctcggcgtcaatttcgcgctgttctcggcccacgcgaccaaggtcgagctgtgcctgttcgacgcgcgcggggaaaaggagatcgagcgcatcgaattgcccgagtacaccgacgagatctggcacggctacctgcccgacgcccacccggggcagatctacggctaccgggtgcacggtccctacgagccggatgccggccaccgcttcaatcccaacaaattgctcctcgatccctacgccaagcagttggtcggccgcctgcgctggtccgaggcgctgttcggctacaccatcggctcggccgacgccgacctcagcttcgacgagcgcgacagcgcgcccttcgtgcccaagtcgaaggtcatcgatccggccttcacctgggccgagcgtccgccggtacgcgtcccctgggaccgcacggtgatctacgaagcccacctgcgcggcctcagcatgcgccatccgcaggtcccggaggcggttcgcgggaccttcgccggactgatgaacgccgacctgctggcgcacatccgccggctcggggtgaccagcgtcgagctgctgccgatccacggtttcgtcgacgacaagcacctgctggaaaacggtatgagcaattactggggctacaacagcatcgccttcttcgccccgcacccggcctacctcgccagcggccaggtcaacgagttcaaggagatggtcgcgcacctccacgacgccggactggagctgatcctcgacgtggtctacaaccacaccgcggaaggcaacgagctgggtccgaccctgtgcatgcgcggcatcgacaacgcctcgtactaccgcctgatgcccgaccagcgccgctactacatcaacgattccggcaccggcaacaccctcgacctcagccacccctgcgtgttgcagatggtcaccgactcgctgcgctactgggccacggagatgcgcgtggacggcttccgcttcgacctggcgaccatcctcggccgccatccggacggtttcgacgagcgccacggcttcctcgtcgcctgccgccaggacccggtgctgagcaagtgcaagctgatcgccgaaccctgggattgcggccccggcggctaccaggtaggcggcttcccgcccggctgggcggaatggaacgaccgtttccgcgattgcgtgcgcgcctactggcgcggcgacgacggcatgctgccggaactggcgcggcgcctaaccgcctccggcgatctctacgaccagcgtggacggcggccctacgcgtcggtgaacttcgtcaccgcccacgacggtttcaccctgcgcgacgtggtttcctacgatcacaagcacaacgaggccaacggcgagaacaacgccgacggcagcgaccacaacctgtcctggaaccacggctgcgagggccccaccgacgacccggagatccgcgccctgcgcctgcgccagatgcgcaacctgctgtccaccctgctgctgtcccagggcaccccgatgctggtcgccggcgacgagttcagccgcacccagcaaggcaacaacaatgtctattgccaggacaacgaactgggctggatcgactggcggctggacgacgagggccgttcgctgctggccttcacccagcgcctgctggccctgcgccaacgctatccgatcctgcgcagggggcgcttcctggtcggcgagtacaacgaggcgctgggtgtcaaggacgtcacctggctggcgcccggcggcgaggagatgaccgaggaacattggcacgacgagcatgcccgctgtctcggcgtgctcctcgatggccgcgcgcaacccaccgggatcctgcgcagcggtgaggatgccaccctgctgctgatcctcaatgcctaccacgacgcggtgtccttccgtcttcccgaggtggccgaaggcagcggctggacctgcctgctggatacccagcggccggaggacccgctcggcgaacgctacccgttcgccagcgagttcctggtcggcggccgcagtttcctgctgttcgagctacaaccgccgggcgccggagcggaaggatgaacggcggggaaaaaagctgaaccgcccccggcacctccagtcggaacctgtaggtgccgcacgcggcgcccgcacatccaccctacacaggaggacagcatgaagatcagcgacatcatgacccgcaacgtccaggtcgccgacccgcagcagagcatccgcgaggcggccgccaccatggcgaggatcgacagcggcgccctgctggtcggcgaaggcgaccgcctggtcgggatgatcaccgatcgcgacatcgccatccgcgcggtggccggcggcctgtccggggataccccgctgggccgcatcatgagcggcgacatccactattgcttcgaagacgaagacgtccagcacgtggcccgcaacatggccgacatccagatgcgccgcctgccggtgctcaaccgcgagaagcggctggtcggcgtggtttccctgggcaacatcgccagctgccgcgaccaggcctccagcgccaccgtcctgcagggcgtcgcccaggcccactactgagcctttcttccacccggcccgcctttgccgttccggccgaggccgggcctcaaccgggagaacgccatgaaagccgtggtattccatgacatcggcgacatccgcctggaagacgtggcggagccgcgcctgcaggagcccaccgacgccatcgtgcggctgaccgcctcggcgatctgcggcaccgacctgcacttcgtccgtggcagcgtcggcggcatgcgtccgggaaccatcctcggccatgagggcgtgggcatcgtcgaggcgctcggcgacgaagtgcgcaaccttcaggtcggcgatcgggtggtgattccctcgaccatcgcctgcggcaattgcgtgtattgccgagccggctactacgcccagtgcgacgtcgccaaccccggcggcagccaggccggcaccgcgttcttcggcggcccccgggccaacggcggcttccatgggctgcaagccgagaaagcgcggattccctatgccaacatcggcctgatccgcctgcccagcagcatcagcgacgaccaggcgatactcctgtcggacatcttccccaccggctacttcggcgccgaactggccggtatcgcccccggcaacaccgtcgccgtgttcggctgcggtccggtcggccagttcgccatcgccagcgcgttgctcctcggcgccgccagggtgttcgccatcgaccgccacccggaccgcctgcacatggcccgccagcaaggcgccgaagtgatcgacttcgagcgcgaggatccggtccaggccctgcgctggctgaccgccgggatcggcgtggaccgcgccatcgacgccgtcggcgtggacgccgagcacagccatggcaccgccaccccggcgccgcgccaggagggcaccagctggagtcccggcaacgcccccgcacaggccctggagtgggcggtgcagggcctggccaaggccggcaccctgtcgatcatcggcgtctacgccgaagactcgcggcagtttcccatcggcctggcgatgaaccgcaacctgaccatccgcatgggcaactgccaccaccgcaagtacattccgctgctgctcgaacatgtgctcagcggacgcatcgacccggcgaagatcctcacccaggtgaagccgatcggcgacgccatcgaggccttcgaagccttcgaccgccgcgagaccggctggatcaaggtcgaactggtgccgcagaagcgccaggtcgagggcagcgaggaacgcctcgacgaacgcgcggtggacgaactggcgcgccggccgacgccggaaagcggcgcccgggggtgatgcatgagcgcaccggcacgcctgcgcatcggcatttccggctggcgctacgccccctggagaggtgacttctatcccgaggggctgcgccagaaggacgaactgcgcttcgcctcgcgggcggtgaacagcatcgagatcaacggcaccttctacgccctgcagacgcccgagcgcttccgcggctgggccgaggacacccccgaggacttcgttttcagcgtcaaggccccgcgttacatcacccacgtgcggcgcctgcgcgagatcgaagagccgctggcgaacttcttcgcctccggccccctcgccctgcgccagcgcctcggcccgttcctctggcagttcccgccgagcatgcgcttcgaccgcgagctgttcgccgatttcctcgcccgcctgccgcgcgacggcgccgccgcgcagaagctcgcccggcacagcgccgcgcgcctgcaccgcgagggctacctcgacggcgatccggcgcagcgcctgcggcatgccgtggaaatccgccatgagagcttcgtcgacccgacgttcatcgagctgctgcgcgaataccgggttgccctggtggtggccgataccgccggcaagtggccgctgctcggcgacgtctgcgccgacttcctgtacctgcgcctgcatggcgacaaggaactgtaccgcagcggctattcggaagcggccctgggccagtggcaggcacggatccgcgcctgggccggcggcggccaggccgacgacctgcgccgggccagccaggacgcaccggcgaaggcgacggcgcgcgacctgtactgctacttcgacaacgacgtcaaggtgcgcgcaccctacgacgcccggcgcctcctgcagctgctggaactcgacggcggcctgcgcacggtgcccggacagttgcccgatgacctgcgggagagtgccgcatgatcctgccacgcctgcaggtgctgacggtgaacacccacaagggtttcaacccgttcaatcggcgcttcatcctgccggagttgcgcgaagcggtgcgcagcgtcggtgccgacctggtgttcctccaggaggtcctcggctcccatagcctgcacgccgcgcgcctgccgtcctggccgccggcgccgcaatacgagtatctggccgacagcatgtggccgcagttcgcctacgggcgcaacgcggtgtatcccgaaggccaccatggcaatgccgtgctctccaagcatccgatcctcgcccaccgcaacctcgacgtctcggtggcgggcaacgaggaacgcggcctgttgcatgcggtgatcgacatcggccgtccgctgcacgcggtctgcgtgcacctgggattgcgcgaggcgcagcgccagcgccagttgcaactgctctgcgaactggtggcgggcctgccggagcgcgagccggtggtggtcgccggcgacttcaacgactggcgccagcgcgctgaccaactgctcgccggttgcggcctgcgcgaagtcttcgtcggcgcccagggccggccggcgcgcagcttcccggcgcgctggccggtgctgccgctggaccgcatttacctgcgcaatgcccgcgggcgccagccgcgcatcctctcgcggcggccctggtcgcacctgtccgaccacctgccgctggcggtggaggtggagccatgaacttcccctggcgcgacggcaaccgcgtagaactgctgatcaacggcgaagagtactttccgcgcctgttccagtgcatcgccgaggcgcgccgggagatcctcctggaaaccttcatcatcttcgaggacgaggtcggccggcagttgcaggaagccctcagcgccgccgccgagcgcggtgtcgaggtgcaggtcacggtggacggctacggcaccgcctcgctcagcccggactacctggccaggctgaccgcctccggggttcgcgtgcacctgttcgacccgcgcccgcgcctgctcggcatgcgcaccaacctgtttcgccggttgcaccgcaagctggtggtgatcgatcgccggcaggccttcgtcggcggcatcaattacggcgaggaccacctggtacgtcgcggcaacatggccaagcaggactacgcggtgcgcgtcgagggcccggtggtgcgcgatatccgccaggcctgcctggcgctgctcgaaccggacgccgactacccgccgttgcggccgtcgggcgccgggcagccggcgcgggtgcgcctggtgatccgcgacaacgaccagtccagcgacgacatcgagcacgagtacctgcaggcgatccgccaggcgcggcgacgcctgctgatcgccaacgcctatttcttccccggctaccgcctgcttcgcgagctgcgcgatgcggcgcgccgcggcgtgcgcgtcgacctggtactacagggcatgccggacatgccgctggtgcgcctgtgcagccggctgctctacgactacctgctgcgcgagggcgtgcgtatccacgaatactgccagcgtccgctgcacggcaaggtcgcggtgatcgacgacgactggtcgaccatcggttcgagcaatctcgatcccctcagcctgtcgctgaacctggaggccaacctggtgatccgcgacgtcgccttcaacggccagctctaccagcacctgcgcgagctggcgcgccgccactgccggcgcatcagccgccgccacgcgaggcgcggctactggtggcgagcgccgctgattttcctcggcttccacttttccaggcactttccggctatcgccggttgggtacccgcccatctgccacgcctgaaatcgctggagccgcgtccgtcgcggcgctggcaggaacgccagggccagcggggcaacccatgaacggcagcggtcacgaagccacctcgacgccgccgcgccgctctcactggcgctggctgcgcaggctgctgaccctggcgttcttcgtgctggtcccggtgctgctgttcctgctggtgaagaatctcgactggcaggaagtccgccacgccctcggcgagtatcgccccgcgaccctgttcctcgggctgctgctggcggccgccggctatacggtgttcagcagcttcgacctgctcagccgctactacatcggccactcgctgcccaagcggcgggtcttcaccgtggcgttcgtgtgcaatgcgttcaacctcaacctgagttcctgggtcggcgccgtggcgctgcgctatcgcctgtacagtcggctcggcctggacatcgccgatatcacccggatcctcaccttcagcctggtgaccaactggttcggctacctgctgctcgccggcatcctgttcagctgcggcctgccggccttgccgccgggctggaagctcggcagcgacggcctgcgcctgatcggcgccctgctcctggcgctggccgcaggctacctgctggcctgccgtttcgcccgacgccgcgcctggggctggcgcgagcatcggctgaccctgccgtcctggcggctggcggccctgcaaggcctgctcggagcgagcaactggtcgctgatggcgctcctgctgtacagcctgctgccgcacagcgtggattacccgagcgtcctggcgatcctcctgatcagcagcatcgccggggtcatcacccatatcccggccgggctcggggtgctcgaagcggtgttcatcgccctgctccaggggcgcctgtcccagggcgtgctgctggccgcgttgatcggctaccgggtgctgtatttcctcctacccctggcgctggcctgcgtggtctacctgctgttggagcgccgggcgatccgcctgcgccgcaaacagcgccgcctgcgccagggccaggcgtgaatcagccggccggacgcagcagcagcgtgcccagcggcggcaggtcgagcaccagcgactgcgcctggccatgggcgccgcacgactcgctggagacgcggccctggctgcctgcgccggaaccggcgaacgcctgggcgtcgctattgagcagcacgtcccagtcgccgccttgcggtacgccgatccgatagccctggcgcggcaccggggtgaaattgtgtaccgccagcagcgatggctcgccggccgcgtggcgcagccaggcgtagacactgttcgcctggtcgtcgccgatcagccattcgaagccgagcgcctcgccgtcgcgcgcatgcagtgcggggagttcgcggtacagccggttgagggccgccaccaggtcctgtacgccctgatgctccggatagcgcagcaggtaccagtccagttcgccgtcgtggttccactcgcgccactggccgaactcgcatcccatgaacagcagcttcttgcccgggtgcgaccacatgaagctcaggtacaggcgcaggttggcgaacttctgccagcggtcgccgggcatcttgtccagtagcgagtgcttgccatgtaccacctcgtcgtgggagatcggcaggatgaaatgctcggagaaggcgtagagcaggccgaaggtcaactggtggtggtgatagcgccggtgcagcgggtcttcgccgatgtacgccaggctgtcgtgcatccagcccatgttccacttatggctgaagcccaggccgccctccgccaccggacggctgacgccgggccaggcggtggattcctcggcgatcaccagcgcgccgggggtttcgctggcgaccacctggttgaggtgatggaggaagtcgatggcctccaggttctcccggccgccatggcggttcggcagccattcgccttccttgcgcgaatagtcgcgatagagcatcgaggccaccgcatccacccgcaggccgtcgacgtggtaggtgcgcagccagtgcagcgccgaggccagcatgaagccgtgcacctcgctgcggccaaggttgtagatgtaggtatcccagtcctggtggaagccttcgaagggatgttcgtactcgtacagcgccgtgccgtcgaaacggcccaggccgtgggcgtcggtgggaaaatgcgccggcacccagtcgaggatcacgccgatgccggcctggtggcaggcgtcgacgaacgcggcgaagtcctccggcgtgccgtagcgcgcggtgggggcgaacaacccgagcggctggtagccccaggagccgccgaagggatgttccatcaccggcatcagctcgatatgggtgaagccgagctggcgcacgtagggaatcagctcctccgccagttccgaccagtgcggcggccggccgtcgcggtggcgccaggagccggcgtggacttcgtagatcgacagcggtgccgcatagccctggcgctccgcgcgccgggccagccagtcctggtcgcgccactcgtggcgcaacgccgcgcaggtcttcgaagcggttccgggcggcgtctcgcaggccagcgccagggggtcggccttcagcggcaggaggccgtcgtggccctgcaactcgtacttgtacagttcgccctcgccgaggcgcgggacgaacagttcccagacgccggatggatagcgtcgtcgcatcgggtgacggcgcccgtcccagccgttgaaatcgccgaccaccgagacgcgcacggcgttcggcgcccagactgcgaagcgcacgccctccacgccttcgtgacgggtcagttgcgcgcccaggcaggaggccagttggcggtggttgccttcggcgaacaggtagaggtcgagttcgccgagcaacggcccgaaggcataggggtcttcgctttcctgcacgccgtccggccagtgcacgcgcaggcggtagcgcggtggcaggcgctccaggtggcgctggaacaagccgctgccggggtcgctctgctccagttcggcgagcgtcgcgccgtcttcgtcgagcagctcgacgcgctgcgcgccgggcaggtaggcgcgcagcacgccgccttcgccgccggggtcgcgctgcgggccgaggaaggcgaatggatcgccctgcaggccgcgctgcagcttgtccagctccagttgccagcgttcgcgttcggacatcggttcgctcatcggttcttgcccttcaggaggtgttcggtgagttcggccagaccggcgagaggcacttccagccagtcggggcggtagtcggcttcgtagagcagttcgtaggcggccttttccaggcaggccagggccagcgccgccccctcgccttcgcgaccctgccaggcgtgcatgagacccgccgcggcggcccgatagccggccaggaaggcgtcgcgggcttcgctgcgatagcgcatggcgaccttgcgccgggcgctgtcggcctgttccgagctatcggtgctctgcgcgttgcgcaggaccatcgccgccgcgtagtcgaacgagcgcagcatgccgccgacgtccttcatcggactgtggcgctggcggcgctcttccaggctgcgcgccggctcgccctcgaagtcgatgaagcgtgcgtcgccctggaccatcagcacctggcccaggtgcaggtcgccgtgaaccctgatcagcagcccgccggctgcctgccgggccagcagcggcaggcgttcgagcagcgccggcaggcgttccagcaggcgccgcgcctgttccgccgcctcgccctgcaacggccgtggcggctcgctcaggcgtttgccggcttcgcgcaactgttcggcgatgcgcagcgcccaggcctggacgctggcttcgtcgctctcgcggctgccgaaggccggatcgtccgactcgccggccagtacgctgtgcatctcgccgagccgggcgccgaggttggcggcgaagccgcgcagttcggcgaggctgtcgtattgcccttcgagcgcctcgctggccgcggatatctcgtcgcgcacggctcgctccaggttgtccagggtccagttccaggcgtcgccctggttgttcaggtagccctgcaggatcatcagcgtgtgcggctcgccatccgcgccgacccgccgtacctcgccgagcaacggggcgatgccggggtagccgtggcgggtcaggtagccgccgacctcgatttccgggtgcagccccggaaggatcttgcgcagcaccttgaggaccatgcgctcgccgaagcggatcgagctgttggactgctccaccgagaacggcaggacgtcttcgtcggcgatgtcgtccatttccgccagtcccgccgccgggatgaactggatctcgccgtcgccgtgggcgatcaccgcctcggcgcggagttgcgcgaggaccttgcgggcgaacagcggcaggctggcggcgtcggtcagcaggccgaccttgcgaccgcgccgcaggcgcgccagggccagcaactgaggcaggctgtcgccgcgctggtcggcgtcgaggaagcccaacggcaactggtagcgcagcccgtcgatctccacttcgcacaacgcacagcgcggctccgcctcgtccagcggaacgatgtagcagagccgtggctggcctttctcgccggcgaaccagcggcgcttcggcaggtaggccggcagcgtctcgccttccaggatgttccgcgatgcgccctgcagcagctcgccgaggcgctgcttgaccaccagggtcggcagttccggcaggcgctcgtcggcggccacgtgccagctcggcatctgcgtcgcgtcggccaggtagaaccagtagaagccgtagggcggcagggtcagcaggtaggtcagctcgccgatcggcgggaacgacatgccgccgatcatctccaccggcaccttgccggcatggctggcgaggtccagttccaccgcctgggccgcgcgcgacaggttggccacgcagaggatgctgtcctgccgttcgccctcggcgtattcgcgcaggtaggcgaggatccgtcggttgctcggcgcgagcatcttcaggctgccgcggccgaaggccttctgctggctgcgcacggcgagcaggcggcgcatccagttgagcagcgaatgcgggtcgcgcgcctgcgcctcgacgttgatcgtctggtagccgtacagcgggtcgagaatcggcggcagcaccagcttcgccgggtcggcgcgggagaagccgccgttgcggtccaccgaccactgcatcggggtccgcacgccgtcgcggtcgccgaggtagatgttgtcgcccatgccgatctcgtcgccgtagtacagggtcggcgtgcccggcatcgacaacagcaggctgtgcagcagctcgatgcgccgccggtcacgctccaccagcggcgccaggcgccggcggatgcccaggttgaggcgcgcgcggcggtcggcggcatagtggttccagagatagtcgcgctcgtcgtcggtgaccatctccagggtcagctcgtcgtggttgcgcaggaagatcgcccattggcaattggccgggatgtccggggtctggcgcaggatgtcggtgatcggatagcgatcctcctgggcgatggccatgtacatgcgcggcatcagcgggaagtggaaggccatgtggcattcgtcgccctcgccgccatcctcgccgccgaagtacggccgggtgtcttccggccactggttggcctcggccagcagcatgcggtcgggatagtgcgcgtccagctcggcgcggatgcgcttgagcacctggtgggtctccggcaggttctcgctgctggtgccgtcgcgttcgatcaggtagggaatcgcgtccaggcgcaggccgtcgacgcccatgtccagccagtagcgcatcaccccgagcacctcgcgcaggacctgcgggttcaggacctgcgggttgtcgaagttcaggtccggctggtgggaatagaagcggtgccagtagtactgttgggctaccgggtcccaggtccagttggactgctcggtgtcgatgaagatgatccgcgtaccctggtatttctcgtcgctgtccgaccagacgtagtagtcgcgggcgcgcgaccccttcttcgcgtggcgggcgcggatgaaccagggatgctggtcggaggtgtggttgatcaccagctcggtaatcacccgcagaccgcgtcgatgggcctcggcgatgaaccggcgggcgtcggcgaggctgccgtagtcgctgtgcacgccacggtactgggcgatgtcgtagccgtcgtcgcggcgtggcgacgggtagaacggcagcagccagagagtgttcacgccgaggtcggcgatgtagtcgagcttctcgatcagcccggcgaagtcgccgatgccatcgttgttggcgtcgtagaaggatttcacgtggacctggtagatcaccgcgtccttgtaccattgcgggtcgttgagaaagaccggcttctcgcgtctggccatgggtttctccttatgcgtcgacgcgccgcacgcgccagatgccgaacggcaggtgccagggttcgatgcgcatccactggaccttgccgtgccagacccagcgatgcccgttcatcaggtcctcgccctggagactggcgtcgtcgggcaggccgaactcccacagcggcagttcgaaatgcgcctcctgggcttcgtgcgggtccaggcagaccgccaccagaacgaagttggcgaggtccgcggtgcgcttgccgaaatacaggatgcggtcgttccaggcgttgtaggcctggaacccgaggtgcgtctgcaatgccgggttttcccggcggatgcggttgagccgggcgatctcggcgacgatgttgcccggcgcctggtagtcgcgcggacgcaactggtatttctccgagtcgaggtactcctccttgcccggcaaggccgccgcctcgcacagctcgaagccggagtacatgccccacagccccgaccccatggtcgccagggcggcacggatgaggaagccggggcggccggagcgttgcaggaaccagggattgatgtccggggtgttgacgaagaagttcggccggtagcagtcgcgccagggtggctggttgagttcggcgaagtactccgccagttcctgcttgtcgttgcgccaggtgaaataggtgtagctctggctgaagccgaccttgcccaggcgcgccatcatcgccgggcgggtgaacgcctcggaaaggaagatcacctgcggatggcggccgcgcacctcggcgatcagccactcccagaacggcagtggcttggtgtgcgggttgtcgacgcgaaacagcgtcacgccctgctcgacccagcccagcaccacgtcgcgcaaggcttcccacaggctcggcagggcctgttcggcgtagaagtcgacgttgacgatgtcctcgtacttcttcggcgggttctccgcgtagcgcaagctaccgtccggacgccaggcgaaccagccgggatgctcgcgcagccaggggtggtcgggggagcactggatggcgaagtccagcgccagttccatgccgtgctcgcgcaccgcaacgagcagccggcggaaatcctcgcggtcgcccagttcgggatggatcgcctcgtggccgccatcctcactgccgatcgcatacgggctgccggggtcgccggcctcggcacgcaaggaattgttgcggcccttgcgatgggtgcggccgatggggtggatcggcgggaaatagagaacgtcgaagcccatcgcggcgatctgcggcaggcgccggatcacgtcgtcgaaggtaccgtggcgtgtcgggtcgccgctttccgagcgagggaacagctcgtaccaactggcgaagcgcgccagcggtcgctccacctccaccgggtattcgcggctgcgcaccaggtgctcgcgcgggccgaccagacgcaacagttcgccggtctgcgccgccagccacagcgccacccgctcctcgacgctctggcaggcctgcaggcgttcggccagcggcgcacaggcggcggcgatctccggaccgccgcgctcggcgcagcgctgcagcagttcgtcgccctcgcgcagctccaggtccagcggcaggcgtgcgccatgcttggcacgcaattcgcggcggtagccggcaaaacggtcgatccaggcctcgatacggaagtacaggcggccgcagggcggcgtgcgcaactgcgcgctccagaaatcgttgccttcgggcagcagcggcaggcgccgctccgcggtttccccgacacgccgccagaccacctcggcaccgagtacctcatggccatcggcgaagattcgcgcggccaggcgcaggtcgcggtcgctctcggtcttcgcgggataggcaccctcttccaccacagggctgaccgactcgatggcgatacggggctgctggatggcgatgaccagcggatcatcgtcgctgttgcggacaatcgaactcatcgaggcgcgctcctccgggacgtgggttcggcgatgggtcgcgaggcttccgccggcctcgagtggccggcggcgcggacggtcattgattccgagcccgccggcgaccgattggttcaggttgatttacccagcggctcgcctcaggccttgcgccgcgaacgcgaggcaccggacttggcgcgacccttcgcgtcggccccggccttttcgctgcccttgtccttgccaccgccggcgcgggaacgcaggctgcgcttgagcaggtcggtgagatcgatgatgtcggcgcccttgccagccacctcctcctcttcctccaccgcgtgcagctggcccttggcggccttttcctcgaccagcttcatgatcttgtcgctgaagctgtccttgtattcggccggctcccagtgggaggccatgtcctccaccaggcgcttggccatctccagctcgcgcttgtcgagtttcgcctcggtgacgctttcgtccagctccaggccatccaggctgcgcacctgcgacggccagcgcagggtgatcagcaccagggcgtcctgcagaggccgcaggagcgccaggtgctggcgggtgtgcaggacgacgttggccagggcgaccttgccggtgcgctccagggtctcccggagcagcgcgtagaccttgcctccgcgccggtcgggggccaggtagtacggggtatcgaagtgctgcaggggaatttcctggctatcgacgaacgcgaagatctcgatggtctgggtcgacttgggatgcgccgcgcggatttcttcctcgctcagcaccacgtagcggcccttttcgtactccacgcccttgacgatgttctcgcgctcgatctccttgccggtgaccttgttcacccgcttgtagccgaccggctccatgctgcgctggtcgagccagtcgaaatcgatgccctgcgacgaggttgccgccgacaggctcaccggtatatgcaccaggccgaagctgatcgcgcctttccagatcgcacgcgccatgccggtttcctcctcttgatggttacagcgtgccgccgtccgcgtaacgcacgcggccgtcggcggcgatgtcggtgatgcgctggagcaggttgtcggcggcggtctcggcgtcgctcaggcaactgcaacccggggtcactacccacagcatgcgtaccgccgcgccacgccgcttgggctgatagaggatcaggccgaccggctggcagcgctcctgcatcgcgtcggtccaggcggtacaggcgtcgaagtccttgaacatgacggaactctcctcaatggctatcggaagatggcggcgaacggttcaggcaggccaggacatgcagcaccagtagcgccaggaccgtcccgagcaccgcggtaccctggtgaccgagtccgaccgcgacgcctatggcggtgctggcccagagacccgccgcggtggtcaggcccctgacccggctttcccgacctgccttgaggatggtgccggcgcagaggaagccgatgccggcgacggtgccctggatcacccggctcagcgcgtccgccccgccaccctgcaattgcagcggcatgacgaacagcgccgcgccgagggttaccagcatgtgcgtgcgcaggccggcggccttgccgctctgctcgcgctcgtagccgagtaccgcgccgagcgccgccgccagcagcaggcgcaacgcggcgcgggcggtctgctcgaagtcggcgagatcggcgaactcctcgccgaggatcttccacagcgtctcccaggcgctcatcggcgttgtatcccgctgtagcgcagggcaccgcaacgcaggcagcgctcgcagtcgaaggtttcctcacccagtcgcaacgccggttgccggcaccaatcgcaaccgccgatcaggcaacgcaaggtcatccgggtcctcccgccgaatcgctcggccagccgccctttccagctgtgaccgacgagacgacgggaaggtgcgatcggattcgccagcggcgctcctcaggcggggatcgccttggtcgccgcctcgcgctgccagatccggtgctgcatcaatgcctggcgcagaccggggaagacatcggtggccgtggcgccgagcaccacgccggggtcgccaggcaacgaaagctggctggccagcgcctgggcatcgccagcgaaggccactggcttcaggtgcttgtaggcttccagcaggtagtgcaggccgcgtccgtccgcgccgatggcctggctgctggccgcgccaccaggcacgaagaccgcgtcgaaggctaccgacggcaggccgtcccaggttccctccgggatcagttcggcaccgttttcggcctgcaccggcgaagcgctgggcgcgatcagcttggcgtccgcgccctcctggcggagcgcgtcgcgtaggtcgctgacgtcgctctcggcgacgccgtcggcgatcaggatcgccaccttgcgcgaacggatgtcgccggacagcaggttcatctggctcagcgccggcgacggcttcggctgcggtgccgggttggccggcgcggcgagctgcacaccgacgttcgccgcgaccctggcggccagttgcggatcgatgttgaggagtatctggttgacttcgcgctcacggatcgattgccgctcgaccttggacagttcgaagctgtaggcggcgacgatatgcgcctgctcggcctcgctcatgctgtgccagaacaatgcggcctggctgaaatgatcggcgaaggagtcggcgcgcttgcgcagcttgctgccgctgaccggctcgtggtaggtggagaagccgccgttgcgcgccgccggcggggtttccttcggccagccgccgtcgatcgagttcggttcataggaagcccggccgcggttgatggtctgccggtgcggcgcgtcgcgctggttgttgtggaacggacacagcgggcggttgatcgggatttcgttgaagttcggcccgctcaggcgcagcagttgggtgtcggtataggagaacagccgaccctgcaacagcgggtcgttggtgaagtcgattccggggaccacgtggccgacgtggaacgccacctgttcggtctcggcgaagaaattgtcggggttgcggttgagtaccatccgccccaccacccttaccggcaccaactcctcgggcaccagcttggtggggtcgagcaggtcgaagtcgaagctgtcctgctggttctccgggatcacctgcaggcccagctcccattcgggatagtcgcccttctcgatgtcctcccagagggtccgccggttgaagtcggggtccttgccggcgagcttctgcgcctcgtcccagaccagcgagcaggtcccggacttcggtcgccagtggaacttgaccagcacgctctcgccggccgcgttgaccaggcggaaggtgtgcacgccgaagccctgcatgttgcggtaggcgatcggaatggcgcggtcggacatcagccacatgaccatgtgcgccgactccggggtcagcgaaacgaagtcccagaaggtgtcgtgggcagacgctccggtgggaatctcgttgtgcggctcgggtttcaccgcatggacgaagtcggggaacttgatcgcatcctggatgaagaataccggcatgttgttgccgaccaggtcgaagttgccttcgtcggtatagaacttcacggcgaagccgcgtacgtcacgcaccgtatccgcggacccgcgcggcccctgcacggtggagaaacgcacgaagaccggggtacgcttgcccgcctcggcgaggaagccggccttggtcaggtcgctgaggtcctcgtaggcctcgaagtagccatgcgccgccgagccacgagcgtggaccacgcgctcgggaatgcgctcgtggtcgaagtgggtgatcttctcgcgcatgatgaagtcttcgagcaacgacggtccgcgctcgccggccttcagggtgttctggttatcggcgatgcgggtgccggtattggtgctcagggcctctccggtggcgtcctcgcgataggcctccagctgttccagcttggcgttgctgttgccacggtcgacggtgtcggtgccggccgcctggctgcgctgctcgttgttctgctcgctcatcggtttcctctcctcatcctgggcatgaaaatggggcggatgcctccctgctccgccccattcacttcactgcgcggttatcagttcccgccgtggctgcgctggccacctttcttgccagcctcggaggcccgctgcggatcgttcttgaagttgccgccgctggcctggccgcccttcttgccggcctccgaagcacgtttcgggtcttccgcgaagttgcctttaccaccttgatgctgtgccatttctatttcctccgaataatctcttcagaacagatttcatggacgcatgcgttgcgcatgccctaactctgagagggtgtttcgccagtggttcagattattttcagcgaatgaaagcgaagcgctttgccagcatgtttcgagcgcaatccatagggttcaaagatccttgccttattccattgccagcattgacaggaatccccgaattgcgtcagatgaaagcccgcacatctcggaggagcaccatgaaaccctacgagcatccggcctacagcgatcccgtggtaagcaacgaagaacccgatcgcgattgccatgaatggaatttcgaaccgggagacagtgatcaggaaccctaccccgaatatcatggagcgaataccgaagaatgcccaggcggaggcacttaattattcttttctattgcaacccctgacattccgatagacccattcaataattaatcgtcgaactttaaaacaaatggaactcgccatggaaaacagtgacgaagtgcgattccagcactatttcatttctctcgtggaacaggtggcgaaaccgcttttcgtcgactcctgcgaagaggcgcgcagctacggcctggactgcaacgtggacctcgacctcgacgaggacggccatcctcgcctgcgcctggaagtcggcgagccgggaggcgagaaaagccactacagcctgctggcgattcccggcgagcgggtcatccatcgccagtacctggccggggcccaggaatggcacagcctgccggccgagctggcgtcgatcaacccgatggtgctggacagcgagctggcggtattcttccgccgcgccttcgaccttcgcctggagggccccgaacgccgtcacccggccggcttctggtaaggcccttcatagcttccagatatcccgggcgtattcgctgatcgtccggtcggcgctgaaccagccgatccgcgccacgttgagcaacgccgagcgccaccagcgatcgggctcgcgccagacttcctcgacccggcactgcgcatgccagtaggcctcgaagtcggcgcagagcatgaagcggtcgtcgtgcaccaggccgtccaccagcacttcgtagcggctgcggtcgtcggccgagaacagcccgctgcggatcgcctccagggcttcctccagccgcggcgaggccgcgatcaccccgcccatctccagctccccggcctgccggcgctgctccacctgctgggcgctgaggccgaagatgaacatgtgttccaggccgatccgctggctcatctcgacgttggcgccgtccagggtgccgatggtcagcgcgccgttgagggcgaacttcatgttgctggtcccggaggcctcgagcccggcggtggaaatctgctcggagaggtccgccgcgggaatgatcgcctcggccaggctgacgttgtagttgggcaggaacaccagcttgagcaggccgcgcacggtggggtcgtcgttgatggtgcgggcgatgtcgttggccagcttgatgatcagcttggcctggtggtagctggcggcagccttgccggcgaagatcttcacccgcggcacgcggtcggcggtcgggtcgttgcggatctcctggtacagcgccacggtgtgcagcaggttgagcaactgccgcttgtattcgtggatacgcttgatatgcacatcgaacagcgcttccggttcgatcgccacgccgaggctgtccagcaccaggcgcgccagggcggtcttgttctgccgacgctgctcggcgaagcgtgcccgcagcctggcgtcctcgacgtgttcctcgaggtccggcaggcgccgttccggggtgtccagcaggtcggcgccgagggtctccaccagcagctcggtcaaccccgggttggcctggaacagccagcggcggaacgacacgccgttggtcttgttgctgatgcgctgcggatagaggcgatgcaggtcatggaacacggtttcgcgcatcagctcggtgtgcaatgccgataccccgttgatctggtgcgaaccgaggaacgccaggttgcccatgcgcacccgtcggccgtggccctcctcgatcaggctgaccgaacgcaacaggtcgaagtcgtggatgtcctgggcacgcagcgcgtctatatggaaggcattgatcaggtagatgatctgcatgtggcgcggcaacaggcgctccatcagcgccaccggccaggattccagggcttccgggagcagcgtgtggttggtgtaggacaaggtcgccacgctcagcgcccaggcgtccggccaggccagttggtgcacgtccaccagttgccgcatcagctcggcgacggcgatcgccgggtgggtgtcgttgagctggatcgccacctgttccggcaggctacgcaggtcgtgatgatggcgcaggtggcggtcgagcaggtcctgcagcgaggctgagacgaagaagtactcctggcgcaggcgcagttcctgaccggcctcggtgctgtcggccggatacagcacccgcgagatgctctccgccttgaccacgtcgaccaccgcgccgatatggtcgccggcgttgaaacggtccagttgcaggtcttcctcggcgcgagcgcgccacaggcgcagggtattgacgctggcacgccgccagccgacgatcggcgtgtcgtaggcgatcgcccggatccgctcgtccggccgccagatggctcggccactgtgctcgctgtcgacctgcacgctgccgccgaagtcgatgtagtagctgacctcgggtcgttcgaactcccagggattgccgaaatccagccaggtctcggtctgctcctgctgccagccgtcggtcagcacctggcggaacaggccatgctcgtagcggatgccatagccatgcgcgggaatgtcgaggctggccatgctttccatgaagcatgccgccaggcgtccgaggccgccgttgccgagcgccgcgtccggctccagggcaacgatccgctgcaggtcgacgcccagctcggcaagggcctggcgggtttcctcgagcagcccgaggttgccgaggttgtccagcaacaggcgaccgatgaggaactccagggacaggtagtagacccgcttgcgcgcgggcgcttcgccttgcggggtggcctcctcccagtggtcgatgatgtggtcgcgcaccgccagggccaccgcttcgaaccagtcgtgcgggcaggcggtggatgggtcgcggccgacgctgtagcgcagtttggcgaggatgctggctttcagggtctggaccgcacttggggtctggtcttggctgtcgggcatcgccgggcttccttccggcccgccgctgcaggccggtgcttgcggggttttctcaggcgctcttgcgtaccggcacggcggccgccgcgctttcctggcgcaggcggtcgagcaggtcgtggccggccagggtcaggtggtggaccacccattgctcctggccggtccaggaatgctggacgctgccgcagagcagttgcgcctggttgagcaactgcaagtggtaggccaccgcctcgcggcaatgaccgggtagctcgcgtgcttcccagtgctggccgaagccaaggctttccagatgctccagcagatccctgatcaacccccagtcgcgtttcatcggcatgctccttgtctgcgtcgcggccggccgttccggctacctagaagcggagtcgcggcggccgcgatggttcattctttttcgccggcggcccgcctgtccgcacgacggaaccgccgggcgccggcgtcagtcgggaggaatgccgttgccaacggtcggtgtgcggactggcgcgagagctggagcgcagcttcactgagcagtgacctttcccgtatcccggcaggagcgctccgatgcaggctttcatggttcatttctcagacgccggacaacccggccggaccgtgctcaccactttcgcgccaaccctcagcaccagcgaggcgcacgttcgcctgcaactctgctatcccctgctgttcccgcagcgtctgagcgcggtgcgggtctaccccctgctgccggcggcggcacgcgagtgaacgcggtcgccggggcgcctcagccgttgactaccgtaccgccgttgacgtgcagcacctggccgctgacgtaggacgagtcgttacaggccaggtagacgtagctggcggccagctcttccggctggccgggccggcccatcggcgtatccgcgccgaagtgggcgaccttctcggcgctgaaggtggacgggatcagcggcgtccagatcgggcccggggccacggcgttgacgcggatgccgcggttgaccaggttcatcgacagcgaccgggtgaacgaggtgatcgcgcccttggtcgaggaatagtcgatcagctgggggttgcccttgtaggcggtgatcgaggtggtgttgatgatcgccccgcccttgcccatcagcggcagggccgccttggtcaactggaacatgccgaagatgttggtgcggaaggtcttctcccactgctcttcgctgatgtcctccaggcgcgcctgcggatgctgctcgccggcgttgttgaccagcacgtcgaggcgcccccatttctgccttagcgtgtccaccacctggcggcagaagccggcgtcggcgacgtcgccggcgaacgccaggcactggcggccgagcgactcgatgatctcgcgggtcttcgccgcgtcttcgttctcatccaggtagaccagcaccacatccgccttctcgcgggcgaaagccaccgccaccgcgcggccgataccactgtcgccgccggtgaccagggccaccttaccctccagcttggccgccggacggtaatcggcggaaacgaactccggcttcggctgcatctcgctttcgtggccgggacgttggtcctggtgctgcgcaggcagggtctgtcgctgttcgctcatggtggtttcctctctgtcggacgcctcaggcgcgttcgccgcgcaaggcgcgttgatggaattcgggcaggcgccgcagcgcccagcgggtggcttcccggcgcatccgcgcggggtcgccgtggaagcgctcgcggcgcgagaacagggcgaggccggcgggcaaccggaaggcccaggcgaagcacacggtaccgggcgggatgccgtccttcgcttcactgccgagcaaccccgtgaccgccagcgcggcgctcgccggactgcgttgcagggccgccctggccatggcctcggcgacctccacgctggtcaggttgaaacgctccagccagttcgggtcgagccccagcagggcaagcttggccgccggcgaatagacgacgaagccgccttccatcaccttgccgctgccggccaccgccgacagttcggcgctgatctgcccggcagtacaggattccgcggtgatcaggctgaggtcggcgctacgcaggtaggtcaccagacgagaggcctcgtccgcgagttgcaggtcgggcatggcacgctcctcagggcgagatcgggtcgctggcgggaaaggtctccttcaacgcgtcgtccagctggcgatcctccgccacctggggccgggtagtgccgccacaggggcaatcggcgtcgcgacacggctcgccctgggggtggccgccggcgcaggccgcgcagcaatagtgctggccgtcgcgttcgacggcatcggcgccgggctggcaggtgcatttgggacaggcacaggtttcgctgttcatgggcaatctccagtggggttcacttgctgtgttccggcgaggtcaccgggcgcaagccacgggggccggtccagccccagaggaccaggccgagcacgggcaggagcaggatcagcagcgaccagccgagcttgcgactggcggagctgtcgctgcggagcacgctgttgatggcccaggcatccaccaggagcaacaggaccagcagcgcgaggatcaggtaggcggtatccatcgggggcctcctcggcatctcgttgcacggtggaggccctgtgcgccgggggagttccgcctttttcgcggacggtcagccgcgcccgagctggcgccgcatggccgcgctgatgcgctggcgggtgccggcgtagtcggcccagggatcgtcgccggcgagttcgtcgaggcgctgcggcagactgcgcaggttccattggttggcgccctgcagcgagtcgagttcctcgcggaacaccggtaccgacaccggcaacccttcgcgggcgcgcaccgagtaggcggccacggtgctggcgccgcggctgttgcgcaggtagtcgacgaagatcttgccgacccggttgcgcggcccggaaaccgccgagaaacgctccggcatcaggcgcgccaagtgctgggagatggcctgggcgaaatccttgacctcgtcccagccatgccggcgctccagcggcaccagcaggtgcatgcccttgccgccgctggtcttgaggaaggcgcgcaggcccagctcgtcgagcaacgtcaggctcagctgggtcgcttcgagcatgcgcttccacggcagcgccgggtccgggtcgaggtcgaggacgaaacggtcgggccgctccaggttggccaggctggcgttccaggtatggaattcgatgctgcccatctgcaccgcgccgaccagcgcctcggcgctgcggatctgcaacagcggcggatgaccgggatcgagcgccgggtcgagctggacgatgccggggatcttcaggcgcgccgcgtgcttctggaagaacagttcgccgccgattccgtcggggccgcgcaccagcgacaccgggcgctcgcgcaggtcgcgcaggagcaggtcggcgtagcgcgcatggaactcggcgagttccagcttgctggcctggatcgacgggtcgatcagccgctgcggatggctgatgcgcacgccggcggtggccgcccgcgacgcaccggcgccggccttgcgcgcgccgcgcagcggcggcgggccggcgggacgctcgccggtcacctcacgcgccggcttgtcttcgcgcaagccgtggaacactgcctggcggatgatcccgccacgggtcatctgcgcataggaaacctcgcacagctgttgcgggcgcacccactgcaccgacccggtctcgcgcgccggcggcaccttcgccaatgggctggaacggaccgcgaggggttccaggcgctcacggaccttcttcaggctggccgcggtgaagccgctgccgaccttgccggcatagcgcagccggcgctcctcgtcagggctgtagaggccgagcagcaaggcgccgatatgccggcgagagcccttcggctcggtatagccgacgatcacgaactcctggcgcaactggcacttcagcttgatccagtcgttgctgcggcgcgaacggtaggcgctgcccagacgcttgccgatcacgccttcgagaccgagcttgcaggcgctggccagcaggtcgcgggggtcttccgcgagcgtcgcggagaaccgcagcgggtcttcgtctcgcccttccagcagcgcctccaggcgcgcgcggcgctcctccagggcgacatcgcgcagatcctcgccttcgtggtacggcaggtcgaagaggacgtacaggatgttctcgccgcgaccttcctcgaaggcgttctgcagggcctggaagtccggtcgaccctcctcgtcgaggacgaccagttcgccgtccagccaactgcgctgcagaccgagcccggccaaggccttctccaggtgcggcaggcgttcggtccagtcatggccgttgcgggtcagcaggcgcacgtggccgtcttcgatgcggctcatcagccgatagccgtccagcttgagttcgtaggcccactcccctcgcggaggctgctcgaccaggctggccagctcgggggcgatccattcgggcatcggcgtcttccccccgctcttgccgcgtcgcgccggcctggccgcgggcgtggcggtttcgccatggcggggcagcagcgtacgctcgctgagcacgctgtcgggacgctccttcagcacgtcgaagcgatccaggctgcgcgcctcgccgtccttggccttgaccaggaaccactggggctgcttgccgcgcaggttggtgcggatcaggtgccaacgcccggagagtttctcgccatccagggcgaagctgagatggcccttttccaggccctcgcgcggatcgtccagaggcgtccaggcgcctcggtcccagacgatgacatcgccggcgccgtagtgcccctgggggatgctgccttcgaaatcggcatagtccagcggatggtcctcaacctgcaccgcgagccgcttcaccgccgggtcgaggcacggccccttgggcaccgcccagctcttcagggtgccatccagctccaggcggaagtcgtagtgcaggcggctggcgtcgtgcttctggacgcaatagcggagcagcccggtgctgtccttgcgaggcttgcggccgctgggctccggggtctggcggaaatcgcgcttgcgggcgtactcggcgagcggcttgctgctgggcatggtgggctcctcggtgctcagacgccggggcagaccggcgcgctgtgcaggaccatgtcgatggctttccccagttcctccagggtcaccggtttgagcagcaccggatagggtgccgccgggtcgatgccgacgcgagcgctgtcgctgagcaggatcacccgcatccgcgggcgcaccggcaggctggtttcgatgagcatgctgccgctcagaggaccttcgagctgctcgctgagcaggaacaggtcgatcaccgcgtccgaggccaggtggtcgagggcttcgtcgcgactcgccgcgctgagcaccgcgtagcctcgatcgaggaggaattcctcgatccgccagagctggtcggcgtgttcttcgaggaccaggacgatcttgttttctccgttcaccatggttctccctgtcggattgtcaggaaggcttcgctgcaaggttcgcgccgtccgccccgcttgcgccggagcagcgtgaccacggcgattgggcgcgggctgatcgcaaagtgcgatcagcagagtgcccggaaggcgcctgttcatcgtgcagattgcccgacccgcgcggaccgctggtaagcccgccggcaccaaccgcgtcgaccggggtccagcctgagagaccgcgagcgaaggagccagccatgcgccctgccccagaagacgccgcagacgatgcgttcgaccagcgcgagtatccgatcccggagcgcctggaaagccagcgccgcgcctggcgtttcgaacgggcgggcctgtgggtcctgctcggggtgatcctcctggcgctgaccggggtgttcgccggcgggcctctgagttcgcggacgctggtcagcgacagcggcaggctgaccctggcctacgagcgtttcgaacgcagcggcgccgccagccgcctgcgcatcgatctgcgcggcgcgccgggcaccgaagttggcgtgcgcctgggcggcggactgctacaggcgcacagcatccagagcctgcaaccgcaaccgctgcgcagtcacagctggcggggtggcctggaactggagggaaggctcgacgaagacggtcgcctgagcctgttcctgacgttgttgccgaaccagctcggcgaagtcgccagtcgactggagttcgccggcgagagcctggccttcgaccagttcatctacccctgagtcatccgttccgaggaggcgtacgatggattccatactgcgagccgccgcgctctacctggtcctgctggtactcttccgcatcgccgggcggcgttcactgaccgacatcaccaccttcgacctgctgctgctgatgatcatcggcgaagccacccagcaggcgctgctgggcgacgacttctcgctggtcaacgcggtactggtgatcatcaccctgatcgtcatcgacgtcggtctgtccctgctcaagctgcgccatccgaagctcgacaccctgatcgagggctccccgacgctcatcgtcgagtacggcaggccattgcacgcacgcctggccgaggcccgcctgcgcgaggaagacattctcctggccgcccgcgagacccagggcctggaacgcatggagcagatccgcttcgccatcctcgagaagaacggcaagatttcgatcattcccgatcgcggcgactgacgctgcgcgcctggcgcatcagcagcggctggatgctcaggccgtgcacgcagatgctcagggcgacgaggctcagcaccaggtcgctggcggtatgcgcgagcgccgtaggcagcccctggttcagcgcgtagctgaggtagtacaggctgccgatgccgcggatgccgaaccagccgagcaggcgccgctgcgccgggtgcatcagccgccggccgaccagcagccagaccatcgccggccggcacacgcagaacagcagcagcgccagcggcagcgcgcgccagtcccagtgctggtagagcatggcgccgagcagggtcaccagcagcacttccagcgagcgctccagcaggttgccgaaggagagcacgtcgagcatcaccgcgccggccgccaccttcgggtgttcgctgcggtcggcgccgtactcgatggcgccgctggcctgccctgcctcgcgcacgtcggcggcggccgcctgcgcctcggccggtgccgaggcgcgccccagcgtcgccacctcggcgtggcgcaggccgatcccggcggcgaagctggcgaggaagccccagccgcccagcgcgtcggcgccgacataggacagcgcgatcagcgccagggcgaggaagtcgttggccgacaccgaggtgtcggtgtgccgcgcccgcaggtggatggccaggcggccgagaccatggcccaggcaatagcccaccagcaggccgagcggaatcgcccagagcacgtcgcgcagcagccagtccaggccgctgcggtcgaactccccgggcaggccgccgccctgaccgatcagcagcagggcggcgatgacgaagggaaaggcgatgccgtcgttgagtcccgcctcgccggatacggcgtagcgcaggcggtcgtcgtcgccggcgtggttgacctggatgtcgctggccagcaccggatcggtgggcgcgaggatcgccgcgaccagcaaggccagcccccagtccaggccgaacaggaaatgcgcgcccagggtaaggccgaggatacagccgagcaggactggtccggccagcagccaggcagcggtccaggccggcgagcgcaacggcaggcgcagcttgaggccgccgatgaacagcgagatcagcaacgccgcctcgctgaggtgttcgaaccagccgctgatgtccgccaggccgctgcgccaggcgtgcagcccggccgggccgatggccaggccgaacagcaggtagatgaacgaggtgctgaccggcagcaggcgcaggtaggccgaggccaggccgagcgtcagcaggatgcagcccagtaccagcaaccacaggctgaaactcatgcctggccaggctccgcccgcgggggcgttacttggatgggtgcgccttggccagcgcgcgggccatctccaggtgatgcttcagggccggcagatgggtcttggcgaatgcctgcagttccgggtcggtcaggttgtccgcggcctgggtgaacagttccacggctttttcgtgagccgccacctggttattggcgtaggccgggtcgaaggaggcgtcgcgcaggtcgagcagggtcgccttggccttgtcggtcaggctggcgtcgtcttcgacctccagtttcttgcgctcggccaggctgcgcagttcggcgttgaccttgccgtggtcgtcgatcatctgcttggcgaataccttcacatcggcggcggtgctcttttccagcgccatcttgccggcttcgatttccgctacgccggccgccgaggcctcgctgacgaaggtctgtggcgcggtcttgttcatgtcctgggcgttggcgaaaggcagggccaggaccagcaggagccaggcggctcccttgaggggaaggctgattgctctgttcatggtcgactccgttggcgtgacagggaaaaaatgccgggacttcggcacaacgcacctcggcatcgtcgctgctgtgacggcgccgccggccgaccgttcagatttttcgccgaccgtgccaggccgggcgccctccccggtcacccctggcggctcgccagcgcctcgatccgcgcccggctcttcggccggcgtacggacagcggcggttcgacccgcatcggcggcgcgatcgcgttgccctggagatagacgtccccggtcggcagccgggcgaacgcatcgtcctcctcgagaccttccaggaccacgcagggcgccagttcgcggcacagggccagcagatggcgcagcacttcggcgcccttcgccgagcgacgtgcttcgcgggtataccggcaatcgatcttgatcacatcgggacgggcatcgagaacgaagtccaggttgttgtgcgccgcgccgaagtcgtctatcgcgatgcgcacgccatgttcgcgcaggcgtcggatgaactcccgggtcgcgactctctcgcccacggcggtctcggtcagctccagcgtcagcctccgtgccacctgcggacgggcggccagccatcggcagaccgcttcccaccaggcatccatcgccgcgctctggcgcgacaggttgcaggccaggcgcaaggtaggctcggcgttcagccggtcgaggaccgtgcccagcacgcagcgatcgagcaggcgtatcaggccgagccgctccagcgccaggatcagttcctgggtcggcaacggcggctcgccgctggcggccgtgaccctgagcagggtttcccggtagagcggctcccattccggatgcccggcatgccgtacggcctgccagtccaggcgcacccgaccgcgcgccagggcggcctggaaacgccgggcgaggcgcaggtcgccggccagggaggcggcaacggccggcgggtgctcgtgctggcgagcctgtggggaactgttcactgtagagctttcctttcctggcggctgacgccgttgtcgtcgatccagtcgaacgccacctcgccgcgcgtcccgccatccacccgccgcggcaggccgaggcgtcgttgcgagcgcggagccagcagcgttccgggcagatccaggcgcgtctcccctatctccagcgccagccccgccagggacacgaagtacggcgtcgggttgtccacccgcagggtctcgtcgcgcagcgcgaagcccagttcggcagccgcgtcctcagcgtgcggatgcaggccgtgcgggcggtacagcaccttcatctgggttcgcagggtgaccgtgagccggggccggccagcggcctcggcggtggcttgcggggggatctcgtagatgttcagccagtacagcgattcgcgatcccgtgcctgggcctggccggtagccagcaggcgcaggctgcgctggcgtcccggctccaggcggaatacgggcggcagcggcaggaacggagccagcgcggtatccggttcgccgtcgagggcaccgtcatcgacccacgcctgcaccagcaccgggtagggattctggttgacaagcagcaacgaggcctcgcgctggccctccacgaacaccaggcgggtgcgctccgcggtcactccggcctcgctcgtcggcgcgaggcaaagcatggccagcagcgcgagcgcgcgcctactggacacggataaccacctgcgccgtggcctcgactcgccccgccgtgacgccgggctggctgccgagcgcgagtttctccaggcgcgcgcggaaggtttcgcggtacaggtcgatgccgccgctaccgccgttggcctgggtcgcgccaccgatggcggggtaccagccggtggcctcggcgttgctgccgccggcggagttctcgttggccaggagcgtcatcggcgtgccgtcgcggtagatgcggatgccgaccccacgggcaatgcccggctccccgtaacggtcggagagcaggtaggacagtccgccactggcgttgaccaggcccagcgccgggctggccgccagggccccgctggacacgcggatgcccagcgccgtggcgccggccccggtgccgttggtcatgccgctctggcacttgaaggtgagttcgaagggcgcctcgcgcacgccgccgccatcgatctcggccagggtgatggacgggaactgcacgtgcggggtgaccgtcatcaccgcgcaagtgggatagcgtttcagggtcacgtagcggtacagcccgatggcacccggccagttgctgtaccagccgccccagttgccgcccacgtgcgcctggccgacggtcggcgcggtcaggcccggccccttgatggcgatgtaggccgccggctgggtgtaggaatagggctgcgagaggatcgtcggcgagtagtagcggatcgcctccagcggcgcgctgtacagctcggcgcgtaccgctgcgaggttcttcgccttgaccagctggaagccgcgcgagtctatgtccagcccggagagctggcgctccttccagatcggcgtgatggtttcccccgtctcgacgttggtcaggcgcagcagcacgttgggccaggcggtccggtaggcatcctgcaggccgatgtcgttgcccaccgtatcggcgccggtgtagtagccgctatagagatcgtcgccgttggtagaaaacatctcgtagacggcgtccccggcgctacagcggaagaacacccgttcggggtcgtagccgccggtggcgccgtactgggtcagcggcgccaccgcgctggcgatgagcgtcggatagggctggaaactctcgtcgctgacgttgaccacgctgggcaggccgagcgagccattgcaggtgtcgcaggcgccggtccaactgccggcggtaccttcgcctgggcggatctgggtgttcgaggtggtcgtctcgctgcctaccgaggtgacccggtagcaagtcgcctgaccactggcgggaagccccagcaacacgccgagggccagcgcgggcagcaggggaagcgtacggttcatctggcgttctccaggttggagtcggtggtggctgcccggcaggtgccgcgcaggcggatcagcgcctggtcgcgagacacaccggccaggtcgtagggcaactcgcaacgctccttgcgcgccgttccccattgcaccagcaacctgccccgctggttttccgcgcgcgcatagacctggccgccctgcccgaccatgccgatggccgccccgccgtcgtcgaccaccacggcgccgagcggcagcacactgccgtcctcgcgccgtgcctggatcagcagcggatggccggtcagcgtcctgaacgtcacgcgcacgctggcaccggcgtagggcgcgaccttgcgctcggtttccagcagttcggcgtcgggatcgatgccaacgggatcgagtgagatcgggttgtagcgatagggcgacagcgagggggccagcgcatagccgttgccgtcgatgcgcgcgccctgcccgccgcgtatcgcggcaccgctggcgcccttggcctcgaccagggcgaaggtatcgccgacgctggggccaagggtcagcccgtcgcggtgggcgaccagcgcgccacggatgccgccgctgtattgccggtagcgatcgccctgggcatagccggcattcacggtggccagcgccgcctgcttctgcaacgtgccgttccaggtggtgtcggcgacctcgctgtcgcggttggcggacagcgcgtagctccaggtacgctcgtcgcccagcgtaccgttcagcccggtttgcaggctgccgccacggctgtcgccggagcgccgggtagccatggcgctgagcgtcggcgcccgactggaagaacccagcggcatggagacgctgagggtcagggtgtcgttgcgctggccgctgcgccggtcgcgccggagcagctcgacgccagggtcctggtcgccctgctcctggtagtaggtggtggtctgccgcgaccaggcgaggttgtagctcaactgcccccaggtattggagtagccgaactgcaattgggtgtcgcggctcttgccgtcgtagaaatcgctggaggagccggaaagatagaggttgccgtaaccgccgagggcctggctcaccagcaggttgaactggttgcgctgcttgtagctgccggaatcccaggtgtccccgtggcgcagtgcgtcgcgcgagccgagcacgtcgccgagttcgcggtagccttcggtggaatagcggtagccggccagggtcagggtagtgccggtgggctggaaggtccggctgtagtcgagcccgatgcgccagccctgcttgcgcgcgccatcctcgacgcgtgcgctggaataggtgctgttcaggccgaaggcgccgaagcgggtggcgaggacgccgccgcccagcatggccaggtagtcgtcggcgacacgcagtcccaggttggcggtcagggcgttgctcatgccgcgctggtaggtgaagtcggcgaacaggtcgtcgccgtcgccgtactggcgcgcctggcccagggtgaagctgtagcgcgacaggccgggacgcatggactccgggaccgaggcgaacggcacgctgaagctcgatacgctgccatcggcttcgaacacctggacatccagatcgccggcataggcgctgtcgtagagatcgtcgatgacgaacggaccgggggcgacattcacctcgcggatcttcctgccgttctggctgatcaccacccgcgccgcggtggccgcggtgccgcgcacctgcggcgcatagcggcgcagggactcgggcagcatgcggtcgtcggtagccaggctcaggccgcggtagccgatgctgccgagcaggttgccggcggtgtagctctcccccgccgtcagttcgctgcgccaggccggcaaggcgcgctgggcataggtgcggatgctgttccacttgcgcctggcctgcccgttgtagcgggaataggtgtagttggactggtggcgcaaacgccacaggccgaggttgatgccgctgttcaggccgacataggcgtagtccgatcgtcccgattcgccgccgcggtattcggagcgatagaggttggtgtcgtagttgacgaagcccatgctgtcgccggcgtcccactcctcggggctgacgtagccgcgcggcttgaggtcgagcaaggcttgcggcaccgagagatccaggcgcaggcgggcgacgtccaggctgaaccgcgagccgggcaggcgtgcaccgagaaaggcgcagtggcgcccgtcgccgctcttgcgcggatcgtcaccaggcttggcgccgaggcgctggcgcaggaagtcttcgtcgaggcagggctccaccgcgccgctggcggggttggcgcggaaactcacttcgctgcggctggcgaagcgctcgttgaggtagacatcgacgtgatagcgacccggatcgatccgaccgtcctggttgaagcgcgacaggtcgccgccgcccagggaagagccgagcaacaggcgatcatcgaattcgtagccgggctgggcatgaccgaaggcgctcgccgccagcgccatgccgcccgccatcagggccgtgccggtgcggcagcggcgttcatggcgataggtcatgacggatatccatatgggcgccgtagtcgttgatcagcagcgcgtgcaggcgcacgcgtcccggcggcagggcttctcgggtttcggcctgccattcggcatggctgcgcggctccagcatgccgctgcgcaagcgccagcggcgctggccgacgctgagcgtggcgctggcgaacgaggcgtagtagccgctcgggttgtccacccgcaccgcccagccggcgctgcgccggaccagtgcgaaacgcagttgcccgggcaggtcctcgggacggccctggatgcccgccgggcggtagaacagcttcaggcgattgcgcagcatcagcagcatctggttccgatccgcatggctgctgttgcgtggcgggatctgcaggacgttgagatggaacagcgattcgcgatcgcccggcaggccctgcccggtgtagacgatgcgcagcgtctggccgctgtccggggccatgcggaataccgccgggttgaccaggaacggcgcgtccgcctggtccggcggcgcgtccggggcgtcgatgtcgacccaggcctggacgacgttgggaaacgcatcgcgattgctcagttgcacggtcttctcccgtgcctcgccgggatagatcacccgggtcccggtcaccaccacgcttgcccgcgcctgggcgatgctcgccagcaggacgagcagaagcgccgatgtcctgccggatcggtacgaatgtctgggcatgcggcttacctggccgggcacggtccagcgaccgggcccggctttagtgctgggaaaaggaaggggcggcgcatgcgccgccggcattcactcgtaacgcagcgtgtaggtcacggcgccgagtaccggaccgggcgtcacggtcgccgcttcggagacgtactgcaccgcgtagtcgtagctggtgctggtggctccgttggcgagcacgatgtcgccggcgggcaccgccgcgccgccggccaggtcgaccgggttgccgccgacgctatcgagcaattgcagcgccacgcccgtcgcgccgctggcggcggtgttcaccaggttcccggcggcgctggggttggtggcctggaacagggtggtgaaatgctcgtcggccgtcggcgcgacgcaatcggtgagttgcagggtgaaggcggtttcgccggcgctgcggcccactgcgccatcgagggcgctcaccggtacgctgtcgaggatcaccgtggggtcggtgaagccgttgaccgcgacctggcaggtctggtcggtcacttcgccgctgaatgtgatagtgtttgccgccatcgcggttcccgaagcggcaattgccgcaaaggccaataccactgcgcatgggttcgaagttctggtcatgcctatgttccttgtgtgaggcaataatcgtccacccgccttttatttcggccgggaacgcggtaaagactcgaacgagttcaaatcgataatcagtggtgcgaaccaccgatataagtatcccgtgcacaggcgtcgaggtgaacgccgaacggcggacttataaatccgttcgagtgcccgccattcggggaattgcctcgtttcgcagggtaccgccgcctcttcgtgctatccgtcgacattgcaacgcttgtatttccgactatggaactctggcatcccggcctctcttgcttgtcttcgccagtttggacttataataaaaaccgtcatccgtgtaatgcatggatggtgccatgcagttaacttccaagttggaagtatgcacttccctgttattcaacgaataattaccgtcgacttttcccgggcaatttccatgttcacccgcaggcgcttctccttgcgcagcaagctttttccgccgccgctcagaagtccggtgcgcagacgagtgccaacggcggcgtgcgcactctcgttgcaagtgggcgctgcgccgatgctgttcggagaatccgtcttgcgacaagtcaacaactcgaaccacggcttcgcctagcattgaaaaagttcctgcacgacagttgtcgggcctgttggtcgtcgctctgccaagtgcctggacatatttccgttatccactgattcggagtccaacgtcgccgaacgtgccggctgccgcgactctcgaaaaaatagcctggagaaactccgaaacaaacattgcacatggaccgtcgtcgcaacggtctccctcaatagttattaaaagaagaggttcgcacccatggcaggcaagcattaccaggatgccgatgtgcatgccgcaaccctatcccgcctccgactggtattccggaacttcgagcgcgtctgcgtcgccttctccggtggcaaggacagctcggtcaccctgcaattggcgctggacgtggcacgcgagttgggacgcagcccggtggacgtactgttcatcgacctggaggggcagtaccaggccaccatcgatcacgtcagcgagatgctcgggcgtcccgacgtacgcccctggtgggtctgcctgccactcaacctgcgcaacgcctccagcctggaggaaccctactggtgctgctgggagcccggcgccgaggccgactgggtgcgcccgctaccgaagcagcgaggggtgatcagcgacccggcgttcttccccttctaccgctaccgcatggagttcgaggagttcgtcgccggcttcaacgcctggctggccagggaagagcctaccgcgttcctggtcggcatccgttcggacgaatcgctcaatcgctacctggcggtcaagcgcaggagccgggcgaaacaatgcgcctggacgccgccgggcggctccgcgccgctggcctggagcgcgcgcgaccgggccaacccgcaggcggtgagcttcttcccgatctacgactggcgtttcgaggatatctggcgttgcgtcgccgaccacggctacgcctataaccgcctctacgaccagatgtaccgcgccggcgtgccgttctcgcagatgcgcatctgccagccctatggcgacgaccagcgcaagggcctcgacctgttccaccggatcgagccacgcacctggttcaaggtagtccggcgcgtcgccggcgccaactatggggcgcgctattgtcgccagcgcttcctcggctaccgtggcggccttggcctgccgccctccttcggcacctggcgcgagtacagccagttcctcctgcgcagcatgccgccgcctctgcgcggcatctaccagcggcgcatcgagcgtttcatcctctggtggaagcagcacgactatccccttgccatctggccggacgcggggatcccggccctggagaatcgtcgcaagcaaccgtcctggcggcgtatcgcgctatccctgctgaagcaggacatggcccgctcgctgtccttcggcttctcccaggccgatatcgacagactggtccccggtcgggagaagcgctcgtgatccgcccgcaagactgcgagatcctgcagtggcgctcgttcgacgacgaggccgccttcttcgccagcatgggccgcttcttcgccagcgcccgggtgcgccgcgaatgcggcggctacccgctgagcgacggtccctaccaccgctggttcgtgctccgccgccagggagacacgcggatactggggttcgtcagcctggagcaacatcccgacgtggttcgcctgcgcgatgcctacctgcgtgcggaagcgcgcggtcgcgggctgttccgcaccctgcgcgagcgggtcctcgggcatgtcgaccaactcgggctggcctgtaccacccgcgcgccccaggcctgcgcgcgccttctcgaaccgcacggcttcgccgtgcattccacccggggtagctgggtgacgctcatgaggaaagcccatggcacagacaaagacactgacggagcgagccgaggcgctgttcggcgaactgcacgggttgccgcttgccgagcggattgaagccatcaaccggatccgccggctgctccacgcgcacagtccgttcgccgaagagccggtcgattgcgtgcagtgggtgcgtgccgagcgcgtcgccggcaacgactacaaccccaataccgtcgcgccaccggagatgcgactgctgaggctgtccatcgagtccgacggattcacccagcccatcgtcgcctatccgcaggccgacgggcgctacgaggtggtcgacggctttcaccgcctgcgcgtgggcagcgccaagggcgcgctgcgccagcgtctgcacggctacctgccgatcgccgcgatacgcgccgggcgtgaaggcgacagcgagcgcatcgccgccaccatccgccacaaccgagcacgcggcgtgcacggcgtattgccgatgacggcgatcgtggtgaccctgctcaaggccggctggagcgaggccgacgtggcccgcgaactgggcatggacaatgacgaggtgctgcgtttcaagcaggtttccggattgcccgagctgttccgcgaacacgtgtattcccgctcctgggagtagcgggcggcgccgtcggccgcaccgctcgcccaggctcaggccgcgccggtggtcaggctgatgtgcttgtattcgacgaagtcgtccagggcggcgaccccgttcagccggccgaggccggactggcggtagccgccctcctcgaattcgtcgtagaccttggcccagtcgttgatccacacggtgccggcgcgaatcttccgcgccacccggaaggcacgcgcgacatcgcgggtccagaccccggccgccagcccgtactcgctgcggttggccagggcgacgccctcctcctcgtgctcgaatacctgcagggtcagcaccggtccgaaggtttcctgttgcacgatgtccaggtccggatcatcgacctccagcagggtcggacggtagaaggcgccggccgccagctcgccctcggttaccgggccgccgcggaccaccacccgcgcgccggcggcgatggcctggcgtacggctcgctcgacgcgctcgacgttggccttgtcgatcaacggccccatgtcgctgcgcgggtccgccgccggccccacgcgcaggttttccaggcgctgcgccaggcgttcgcgtagccgttcggcaacgccgcgctgcaccagcaggcgcgaaccggtcatgcagaactgcccggcgaacaccgtcagcgacttctccagcacgggcaaggcggcgtccaggtcggcgtcgtcgaacaccaggtgcggtgtcttgccgcccagttccaggccgaagcgcttcaggtgccgcgcgccggcggcggaaatcgctcggccggtggcgctcgagccggtgaagctgatcaccggcacctcggccgcgtcgatcaatcgccgggcgccttcggaacccgattcgctgaagatgttcaccgccccggcaggcagcgacggcgcttcggcgatgatccgcgcgaccagggcgttggtctgcgcggtctgccccggcatcttcaccaccgtggtggtaccggcggccagcgccggcgccagggagcggatcatcagcaccaccggtgaattccacggcacgatgatgccggcgacgcccatcggctcgcgcagcaccagcgacaccacgtcggggcgcggcgtgccgctggcgccccgttcgctgcgcgccaggccggcgtagtagcgcagcttgcccggcaccatgccgacctcgaaggcagcctcgggcttgatcttgccgttctccagggcaagcaggtcgatcagcgcatcggcatgccgctcgaaggccgcggcgatttcctccagggctgtcgcgcgcagcgcgtggtcgtccttccagggaccatcttcgaaggcgcgcacagcggcggcgatcgccgcatcggcctcggcccgcccgccgtcggcgtaggtgccgatcggctggccgctggccgggtcgaaggattgtccccgctgcgcggaatcgagccatgcgccgtcgatccagtgtctggcgtgtccgttcatctgcaagttctcctgggtcggtcaggcgatgcgctgcgcgaggtgctcggcaacggcgatggtggtgatgttggtggccaccgaaatggcatcggggaagatcgaggcgtcgatcacccgcaatccttgcaggccatgcaccctgccctccaggtcgaccaccgcccagcgctcgccggcgcggcccatcggcgcgctggaggtcgggtggtggtaggtatcgagggtggcgcggatcgccgcttcgatctgcgcatcgctgcgtgcctcgggccccggcccgagttcggcgtggatcagcccggcgagcggttcgctgcggcctatccggcgcgccagcttgaccccttccagcaaccgcgcgcggtcttcggcctcggcgaggaagttcaggtcgatcagcggcgcgacggccgggtcgcggctggccaggcgcacactgcccagcgattgcggccgggtcagggccacggcgaggacgaagccgaccccggtcgggctcatctcggcggggaacaggtgggtggcggtgatgtgcaggtccagctcgccgttctgcgcccgcgagctatgggtccagagcttggcgccgatcaccggcgactgcgcgccgatgcgctccggccgggcggcataggcgttgtagtagaacggatggtccttgagccggcggcccaccggcaagtcggcaagcaacgggatcgacagcgccttcagctcgtcggccgggccgacaccggagcgcagcaggatcgccgggctgccgtaggcgccggcgctgaggatcacttcgccggcgtggatttcctcgccggaggccaggcgcacgcccaccgcgcgcttgccttcgaagagcacccggtcgaccagcgcgtcgccgcggatcgacaggttggcgcgagcgcgcacggcgttgtcgagataggccatgccggtgttgacgcgcacaccgttgacgacattcatcgggtacggcccgacgccgttggcgtcggcgccgtcgaaatcggcgatggccttgaaaccgttggccagggtggcgtcgacgaaggccctctgcatcggcgagagatcggcgcggctcagttgccgcaccggcagcggtccgtccccgccgtgcagggccgggtcgccgccctggcgggtctccaggcggcggaacgccggcagcaggtcgtcgtaggaccagcccggcaggttccagcgggcgaagtcttcgcgccgcgcgcggatcgccaccgcgccgttgatcgccgagctgccgccgaggaccttgccgcggatcgcatggatcgggtgcccgatcgcccccggttgggactggtagccccagtcgctggaggggtcgccgccgacgctgtcgctgctggcgatgatcctggggtagtcccaggccggataggcctggccggcttccagcaacagtacccggcggtcgccgcgctcgcacaggcgccgggcgaggaccgcgccggcggagccgccgccgacgatcagcacatcgatcctgccgccatcgaaggccttgcggggcgtttccgccgtggcgctggccacgccgggcgcgccgccgagcagcgagcccagggcgagcgcggcggagccggcgacggtctgcgccagcaaggtgcggcgcgccgggttttcgggttggtgcatggggttctcccgtatccagatcgattgacgggagcaacgctatgcccggcgcgccctcggcgacagacagcggaaggcgaaccgctggttcggtttttccgaactcagcccggcggcaacaggccacgctcgatgagcgcgcggtcccagggtgccggatcgccgatttcctcttcgaggaactggccgaggacgaggatcttccggggcgtccgttgggtcttgcggtagaccacggaaacctgcccgccgtccggcgagtagccaggcaggaccggcagcagctcgccggccagcaaggcatcggcggccaggaagctcggcaggatcgccaggccgagcccggcgcgcgcaccttcgagcaactggtgcccggagtcggtgcgcatcctcacccggatgcggaacgaggccggttcgccgtccaccggcagacagagcatgccgccgggctcgcggttgtagtagaccagcccgtcgtgcgcctgtaattcctcgggatgctgcggcacgccatgccgcgccaggtagtcgggactggcgcagagcaggtggcggttggcggtgatcggccgcgccaccaggcaggagtcgtccagccggcccatgcgcagggccatgtcgaagcgcggttcctggaggttgacgaaacgatcgtcggcctgcacgtccacccgcaattgcggatggcgctcggcgaagcgcgccagcagcggcgccaggtagcgcggagtgaaggccagcggcgcggagaggcgcaactggccgcgcaggtcgtcatcggcgtcgagcaccgaggcttccgcctgctccagctcctgtagcaggcggcaggcatgttcgtagtaggtgcgaccggggtcggtgaggctcagcggccgggtgcggttcagcagcacccggcccaggcgcctctccagttgctggatacgctggctgacttgcgacttggtggtgcccaggcggcgggcggcctcggagaagctatgggcgtcgaccacgctgacgaaggtggtcatttcggcaaacttgttcatcggtgtccttctgcgatccgcccccgcggaccccgatcatacgctttccgccgccgctatccgcgcctcggcgacccgacgcaggcggtgcatggactcctccgactcgcgttcgatgcgacggcgcagcaggaacaggttggccaggcgcatcgaccagccgtcgaagcggtattccagggtgcgcacgaagcgggtgccggccacgctcggctggcattcgtagctcaggcgcaggtgcagcccccggtcgccacgggcgttggcgcgccacaggtgtcccggctggtactcgaccaccgtccaggacaagtgcccggcgcggccgccggcgtgaatgtcctcctcgaagcgcgcgccggccggcagcgggccagcggcgccgtcgacccgcaacgacgagggatgccattccggccagagccccgggctggcggcgtaggcgagggtcgcctcgggcccgcgggcgatctcgattcggtgctgcatgcgggtcatggcgtgctcctcggcgggttccgcttcccagtggagggtaccgtagcaccagtccatcaacgggaagaccaggttgaagttgtgcgtctgcatcagctcgcgacggtgatgcagttcgtgcaggcggcgcatgtggcggatccacggcagacggctgagcggatgctccggcggcaggtgttcgcaggcgtggaagatctcgtagctgaggtagcccagcagcagggtcgcggcgaacagcgcggcgaggttgtcgttcagcaggccgagcaggctccaggcgagcagcgcgccgaggctgaagaccaccaccagccaggccgggaacaggatcacccgccagtcgcgggcctgttcgtagcgcatctggccggcgacgaagaagctgtggtggtcgccggtatggcgcttgtagaacatccgccccagcgggtgcttgtggtggccgagggacttgtggatgcggtactcgccccagttgaagaacaccagcgcggccggcaccgtcagccattccagcaggctcggctgctcgagtcgggagaggaagaagacgatccaggcgccgccgtaggcgaggacgaagccggcgtgcagccaggggttgtagccgggccggatggccgcgcggtactgctggcgaaagggttggggatcgaaggacatggtcggcatctcgcgtgtgattgttattggctgggccgcgaaccgggccgatccgccggggcggaagggcttgcattcgagtgtagcgatgccagtcttatcagggtaatggataaatagaatgaggattattcatgaagctgaacttgcagcagctcgacctcaacctgcttctggtcttcgatgccctgatgcgcgaacgcaacctgtcgcgcgcggcgatccgcctgcatcgcagccagccggcggtgagcaacgccctcgcccgcctgcgcgagcagctcgaccagccgctgttccggcgcaccgccaagggcctggaacccaccgccgccgccctcgccctgtacgtgccggtgcgccaggccctgcatctgctgcaggccggccttggctcccaggaaaccttcgatccgcacactgcgcggacctttcgcctgacgatgaacgactatgcccagttgcgcctgctgccgggcctggtgacccgcctgaagaccctggccccgcgggtgacgctggaggtacgtcccgacgaaggcgcctcgatcccggcgcaactggccagcggcgaactcgacctggcgatcgactacctgtacttcgacgagcccgagctggcctaccggccggtcggcgaggaacgcctggtggtgatcgcccggcagggccatccggccttccgcggcggcctcgaccgcgcggcctacgaggccgcgcagcacgtctcgatcctgccgcgggtcgggcgcggcagtccgctggagatcgtcctcggctcggccagggtacagcgccaggtgcaattgctggtgcctcactacctgaccatcccggccatcgtcgccagcaccgagctgctcggcaccgtgccgcgccgcctggccgagcgtttcgccggcagccatggtctgcaactggcggacgtccccttcgagatggccccggtgcaggtcaacctgatctggcatcgccagcaggaagcgacgcccggcctgcaatggctgcgcgagcagatcgtgcagatcgaacagggctgagtcataggttgcgcgcgaggatcagtcttccgtcactttcgatcattgagcgaggcctttcccgcaacctatggtgaggctccgccccgcaaccggccccaggccgccccggggatacagtccagcacccgccagaggagccaccgtatgaccagcctgccgctcgaagccaacgccgccgccaccctcgccgaatggcacgggctgatcgcccgccgcgacctctccgggttgccgcgcctgctgcaccccaatgccgtgttccgctcgccgatggcgcacaagccgtatgccggcgcaccggtggtctcgatgatcctgaataccgtgctcacggtcttcgaggatttcgcctatcaccgccagttggccagcgccgacggccgcagcgtggtgctggaattcagcgcacgggtcggcgaacgcgaactgaaaggcatcgacatgatccgcttcgacgacgacggccggatcgtcgacttcgaagtgatggtccgtcccatgagcggcctccaggccctcggcgaggagatgggccggcgcctggcctcctatctggccgcgagcaaggcctgaggcgatagcctttgggccaaggcccgacgctgcctttgccaagagcgcagcgtcggcccgccgcggcgaactcccgacatgggtgcaacgcccccgccctcccgcgttcagcgtcgacccaagccacagcgaaggggcttgggtagttccgcagcgaaccgggcgaggacatttcccagcaaaaacgccaggtcggtacttcgcgaccccgcgtccatcgcggccatgacccatatcaaggacatcggacggcaattccgccactgtcctggcatccgtccgttctttcccgccccgtgccgccccagggcctccacccgtgaggatgctccatgagcaagatgatgaaagccgccgtattcatccagcccggccgtatcgagctggtcgacaagccgattcccgacgtggggccgaacgatgcattggtgcgcatcaccaccaccacgctctgcggcaccgacgtgcacatcctcaagggcgagtatccggtcgcgcccggcctgacggtgggccacgagccggtcgggatcatcgaaaagctcggcagcgcggtggtcggctaccgcgaaggccaacgcgtgatcgccggtgccatctgccccaacttcaactcctatgccgcccaggacggcgtaccgtcgcaggacggcagctacctggtggaatccggccgttgcgcctgccatggctacaaggcgaccgccggttggcgcttcggcaacctgatcgacggcacccaggccgagtatgtgctggttcccgacgctcaggccaaccttgcccccatacccgatggtctcagcgacgaacaggtgctgatgtgtccggacatcatgtccacgggcttcaagggcgcggagaacgccaacatccgcatcggcgatagcgtggcgatcttcgcccagggtcccataggcctgtgcgccaccgccggcgcccggctgctgggcgccagcacgatcatcgccatcgacggcaacgcccatcgcctcgatatcgcccgtggaatgggcgccgacgtcacgctgaacttcagggagtgcgacgtgatcgaggaaattctcaaactcaccggcgggcgcggcgtggatgcttcgatcgaggcactcggtacgcaatcgaccttcgagaccgccctgagggtgctcaagcccggcggcaccctttccagcctcggggtctattcggaagacctgacgattccgttgtcggccttcgccgccggcctcggcgaccaccggatcaataccgcgctgtgccccggcggcaaggagcgcatgcgccgactgctcaatatcgtggcttcgggccgggtcaacctcgggcctttggtcagccacgaataccgcctcgacgacatcgtcgccgcttacgacctgttcgccaaccagcgtgacaacgtactgaaggtggcgatcaagccgcactgagaccgtcatcctatactgctggacggaggtggcgaacccgtcgcgaacgacgaagcgggttccacccatggcgtcggcggcgcccttgcgccgtcgcttcgcgggggaatggagagaaaccgtccatgaaccgagccaggctctacctctgctgcgtcacgctgctggcgccggtcatcgccggcgcggcgactgccgactacgtctacggcatgccgctggacgtggccagggtgctgagcgtcgacgaggcgcccagcgatacctgccaggtggtgcgcgccaccctggtatacctggactcccacggcgagcgccaggtgttgcactacctgaagcaggcgcgtgcgtgcagcaacgaatgaaaccacgataggaaaggacgaacggtcagggttgtcgtttcatttcacgaaattttcacccctgacatggatactggaaccagctgaaggaccagcgccccattgcatagagcccaccatcgagtgggctttttgcattccgggccgcgtatcgcctggccttgggttcaatcccgctcttccctgcgcagcagttcgcgcttgcgctccacgccccagcggtagccggaaatgtcgccgtcgcgacgtaccacccggtggcagggaatcgccaccgcgatccggttcgccgcgcaggcctgcgccaccgcgcgcaccgctcgcggcgcgccgatccgttcggcgatctgcgcgtagctcgccgtgctgcccggcggtatttcccgcagtgcctgccagacccgttcctggaacgccgtaccgcgtacgtccagcggcaggtccagtcccagttgaggcgactcgacgaagcccaccacctgcgccaccagccgttcgaagtcggcgtcgccgccgagtagctgggcgcgcgggaactggtcctgcaactcgcgcagcaatggctccggctccttgccgaggaggatcgcgcagatgccgcgctggctctgcgccaccaggatcgcgcccagcgagcactggccgatggcgaaacggatcgccgcgccggcgccgccatcgcggtaatcgcgcgggcgcatgccgaggcgttgcgacgaggactcgtagaagcggctgttggagttgaaaccggagtcgtagatcgcctcggtcaccgaggcggacgcctggcccaggcgctcgcgcaggcgccgggcacgataggccgaggcgtaggccttgggcgtcaggccggtttcggccttgaacagacgatggaagtggaacggactcatgcccagtcgggcggccagcgcctctagtgccggcggcgtctccgccgtctcgatcatccggcaggcctgcgccacccgctcggcgcgctgctccgccgccaggctgcggtcgccggcggcgcgccggctgggccgatagccggcggcctcggcggcctcggcagtggcgaagaactcgacgttctcgcgcctgggccgacgcgccgaggaactcgggcggcaatagaccccggtggtcttcaccgcatagacgaacgccccgtccgccgccgcgtcgcgcgccagcacggcggcccagcgctgttcgtcggtgtggtaggcgttgcaaggatcgagctgctggctcatggcgtttcccctgtgggagcggatgatgcccgcagactaattcgccattcaagcgcaagaactccggttcttgcgcttgaattcgagcaaggccatgtgcccggcttcggcaggtgcggaaggccgtcggcttgcctacccatcgccaggcgccataatggcccgctcgaaccggcggaaggattgggaacatggcgttcaaacggatagcactggcctactgcgtgcaactggatcgggtgatctccatcgccagcgcccgccgcgaatacttctcccaggccgagccgcgcaaacgcttcgatttcctctgctccagcgaagggtgccgggcacaggggatcaaggtatcggcgagcaactacgacaagctgccgcaggacacccgcaaggccgcgcacttcagcaagttcccgcactccacccatctgtcggattgcgaatggttcgtcgaggaggacgaggacgctctgcgcccgggcgaatccgccgaggaggccggccagcggcgcatccgcgacaagctggatgcctacgtcgaggagttcgacccggccattgccgaggaggccgcgccgccgcaagcggacccggacaccgaggaacacccgccggcctccgccgcagtgcgcaccgacgctcccgccgcgcctcggcagagaacgcaacggccacggcgcacccgcgatttcgaactgctcgtcgacaccttccgccaggcccgcgccgagctgccggcggaagagttcaagcaactggacatccgcatcagcggcctcggccggataccgctgcgcgcctatttccagcacatcggctatgccaccccgggcagcgccggcaaggtattctacggcggcgccgacctggtccggcgctacggtgcgccgagccggccgcagggcttccgcttcaagttccgcgaccgcatcgacggcaagccggtattcctctacgtcgctccggaaaccttgcagggctatccgcatcggcgctacctcgaagacatcctcggttgcgccgaaacggtgcgctacttcaccctctacgccctcgggcggctcatcgaagcgccgagcggcaagagctacagcctggagccggatgccctgcgccacctggcgatcatccccggtccggcgaaggacgacgcccctcagagctcgtcgtagagtcggtcgctgaccagcatgtgccccggcgcgtgactgatgtacagctccggctgaacctcggcgagcaccgcctggggcgtgaccccgcaggcccagaacagcgggatctcgtccgccgcgagcggcaccgggtcgccgtagtcgggccgcgccagatcgcggatgccgatcagcgccggatcgcccaggtgcagcggtgcgccatgggtcatagggaagcggctggtgacctggatcgcccggatcgcctcggcggccttcaacggccgcatcgataccaccgtgggcccggccaggcgaccgctcggccgggtagcgatggagctgcggtacatcgccacgttgcgccccagctcgaggtggcgcaggccgatgccggcgtcgagcaacgcctgttcgaaggagaacgagcagcctatggcgaaggcgacgaaatccgcctcccagaaggtgccgatgtcgctcacctcgacgggctcctggccgcgtcgatgcaccctgtagcgcggcaggtcgctgcgcacgtcgatatccgcgccgagcctggcgaagtgcggcgagccgggttcgctgacgtcgagcagcgggcaggcccgggggttcagggcacagaagcgaaggaactcgtcggcccaggatttctgcaggatcaccaggttggcctgcaggtggcgctggccgaggccgctggtatggccggtgtagtcgccgcggcggatcagttggcgcaggaccggcggcggcagttgcgcgagttcgtggaaggtcggttcgggcatggcggctccgtgcgctggcggacgtcgttgttggcaggtttgtagaagcggacggcggtcagcgtccaacgagatttttccgccaggggcgatcggaaaatccgaatcagcgcgaacgcagccgccccactcctttcttcagcggcgccaggagcatgcactccgggccgacgttggccgcgtagtcggccagcaccgccttgctcagctccaccacttcgtccaccagttccaggccggtgccgccgcgccaggacaccaccaccggcaggttcggcggcggcgggccgaggcgcagcagggtcagttcgccgcgttccagttcctggctgaccagcgccggcggcaaggcgccgacgccgaagccgtcgcgcagcaggcgggtcatcgccgccaccgagttcacgcagttcaggcgcggcgccgcgacgccgttggcgtgcagcaggccgagtacgtcctggtgcggccgcgagtgcttggagaaggtcaccacccgctcccgcgccaggtccgccagcgaggcgtagtcgcggtggtagatcgagccggtggaaacgatccagcgcagcggatagctgcccagttcgaggttcagcaccgactcgtggcgcagcgagtcggtctggaagatcaggtccaggtagcccttctgcaactgctcggagaggttgcgcgcggtgtccgccatcagctcgatctccaccgccgggaaggtttccgtgaccctggccaccaacgggctcagccaggtgtggatgaccgtgtccatggcgccgatacgaatccgtccctgggtgctggcgccggtgtcgagcgactgcttcagcgcgtgcatggtgtccatcatccgctcggcgtaggccagtaccttgtcgccttccggggtcagggtcacgccacgcgagtcgcggacgaacagtttcacgccgagttcgtcctccagcacggcgatccggctggaaatggaagcctgggtgctgaacagcttctccgcggtgaggcggaagctcttcaggcgcgcgacccagacgaaggtctcgaggaatttcaggttcatatggcgggtaccgacgggcaagggacacaaggtggcgggagcgagcagcttccatgccagcgcccaccttccggcggcacatgatcgacgcatgacggcctgctccgccatcgaaatttcttatccccggcggccgcataaattagttggacgctcgctggccagcctcgaagaatgcgaccaccgggtgcgacggcgcccaccgaatcttcataacaccaataacgacgatcggtgcccccatggaaaaacacatgaccctcgacgccggcccggacgcttcccgggacggtcatttcggctggtatcgcgccctcgacaagcaggaacgccgggccttctggagctgcaagatcggctacggcctggacggcatggacacccagatgctcagcttcgtgatccctaccctgatcgccctgtgggggatcggcaccggcgaagccggcttcatccacaccatgaccctgctcgcctccgccgccggcggctggatcgccgggatcctctccgaccgcatcggccgggtgctgaccctgcaactgacggtgctctggttcgccttcttcaccttcctctgcggcctcgcgcagaactacgagcagttgctggtcgcacggaccctgatgggcttcggcttcggtggcgaatggaccgccggcgcggtactcatcggcgaagtgatcaaggcccgcgaccgcggcaaggcggtcggcctggtgcagtccggctgggccatcggctggggcctcaccgccatcctctactcgctgatgttcagcctgctgccgccggaagaggcctggcgcgcgctgttcatgctcggcctgttgccggcgctgttcgtcctggtggtacgccggctggtcaaggaaccggcgatctaccgcgaggccaggcaacgcaaccagggcgccgacaaggtcagcttctacgagatcttcgcccccgggatgctcagcatcaccctgcgcgcctcgctgctgaccaccggcgcgctcggcggctactacgccatcaccgcctggctgccgaccttcctcaagaccgaacgcgggctgaccgtgctcggcaccagcggctacttggcgatggtgatcctcggctcctacgtcggctacgtggtcagtgccttcctcaccgacctgatcgggcgcaagaagaacttcgtcctgttcgccgtcggctccttcaccgtggtcctgctctacacccagttgccggtgagcaacggcgccatgctctggctcggcttcccgctcggcttcttcgcctcgggcatcttcagcggcatgggctcgttcctcaccgaactgttcccaacccgcatccgcggctccggccagggcttctgctacaacgccgggcgcgccatcgccgcgctgttcccgatgctgatcggcatgctcggccagaagctctcgctgggcctggggatcggcgccttcgccgcggtctcctacggcgtggtgatcctcgccgccctcagcctgccggaaacccgcggcaagcaactggaactctgagccgtcgaccgaggaaatcccagcatgcatcccactccccgcctggctgccgcgctgctcgccggcagcgggctgggctggccgctgctcgcccaggccgacctggtcgaggacagccacgccagcctcgaactgcgcaacttctacttcaaccgcgacttccgccagagcggcgcgcgcgacaacgccgacgaatgggcgcagggcttcctcctgcgcctggagtccggcttcagcgaaggcaccgtcggcttcggcgtcgacgccatcggcctgctcggcttcaagctcgactccggcggcggcagcggaggaaccgggctgctgccggccgacggctccgccggcggctcccaggatgactacgccaagctcggcctgaccgccaaggcgcgggtctccaacagcctgctcaaggtcggcgcgctgcacttcaagagcccgctggtctcggccaacgacacccgcctgctgccggaactgttccgtggcgcgctgctcgacgtgcaggagatcgacggcctgaccctgcgcggcgcgcacctggaccgcaacaagctgaacagctccagcgactaccaggtgttcagcgccaaccgcatcggcgggcgcagcgatgccttcgacttcgccggcggcgactatcgcctgaccccggcgctgaccgccagcctgcaccagggtcggctcagggacatctaccggcagaccttcgccggcctggtacacaccctcgacctcggcggacagcgttcgctcaagagcgacctgcgcttcgcccgggccagcgaggacggcggcttccgcgaactggacaaccgcgccttcggcgccctcttcagcctgcgcctgggcgcccacgcggtggccgccggctaccagcggatcagtggcgacgatccctatccctacatcgccggcagcgacccgtacctggtcaacttcatccagatcggcgacttcggcaacgtcgacgagcgttcctggcaactgcgctacgactacgatttcggcgcgctcggcctgcccggcctgagcttcatgagccgctacgtctccggcgacaacgtcgcccgcggcgcggccaacgacggcaaggaatgggaacgcaacaccgacctcggctacgtggtgcagagcgggccgctgaagaacctcggggtgaaatggcgcaacgccacggtgcgttcgaatttcgccaacgacctcgacgaaaatcgcctgatcctcagctacagcctgacgctgtggtgaggtccggcgagcaatgacctgaaggaacctgcatgaacaacctgttgttgaactgcgatatcggcgagagcttcggtgcctggcgcatgggcctggacgccgaggtgatgccgctgatcgattgcgccaacatcgcctgcggcttccacgccggcgatcccggcaccatgcgccgcaccgtggccctggcggtggagcatggcgtgcgcatcggcgcgcaccccggctaccccgacctggtcggcttcggccggcgctcgctggcctgctcggcgcaggaagtggaagacctgctgctctaccagatcggcgccctcgacggactctgccgcgcccagggcacgcgggtacgctacgtcaagccgcatggcgcgctgtaccaggacatgatgcgcgacccggcgatcctcgccgccgtgctgcgcgcactggcggcctacgaccgcaccctgccgctgatgctgatgagcacccgcgacaacaccgcggcgcgcgcgctgggcgaggcccacggcatcgagctgtggttcgaggcgttcgccgaccgcgcctacgacggcgccggctacctggtctcgcgcagccagcccggcgcggtacaccacgacgccgagacggtgctcgcccaggccctcctgctggcccgtggcgcggcgctgcgagccagcgacggcagcgccctggcgctggaggcgcagaccctctgcgtacacggcgacaaccccgcctcgctggctgcggtgcggcgcatccgcgacgccctggaggcggcatgagccaaccgcaaccgcgcatcgaggtggccgccatcgacagcttcgtcctgcgcctgttcgagcgcatcgacgaagccaacatgccctggctgctggcggcggaggaaaacctgcgggcggcgttcggcgccgccctgctcgacctggtgccgtcctacaccaccctgctcctgcaatacgacctgctccagctcgaccctggcgaggcccgcgcgcggatcgccgcggcgctgtccgacttgcgcccgaaacgccaggacggcggccgtctgcacatcctgccgacctggtacgacccgcgggtcggccccgacctggcccccctggcgcggcgcaagcagctcggcgtcgccgagctgatccgccgccacagccagcgcgagtaccgggtcttcgccctcggtttcagccccggcttcgccttcatggggctggtcgaggaagccctggcggcaccccgtctggcgactccccggcaacgcatcgccgccggcagcgtcggcatcgccgagcgccagacggcggtctatccgcaggcctcgccaggcggctggaacctgctcgggcgctgcccggtgcgcctgttcgacctcaccctggacggctacagcctgctgcgcgccggcgaccgggtgcgtttcgaacccatcggacacgccgaattcgtccgtctcggcggcgacgacacgcccctggaggtccaggcatgaacgactccatccacggcggcctgcgggtgtgccagagcaccccgctggtccagttgcaggatcgcggccgcttcggttgccgccatctcggcgtgacccagggcggcgccctcgactggctgtccatgggctgggccaactggctgctgggcaatcccctggacgccgcggtgatcgagatcgccctcggcggtttcgtcgccgaatgccgtgccgacggctggttggccctggccggcggcgatctcggcgcgaccctcgatggccagccgctaccggcctggggcgcgttcgccgtgcgcggcggccagcgcctggccttcgcccacccgcgccagggcgcccgcgcctacctggcggcgcccggcggcttcgccggcgagcgccagttgggcagcctggccacggtggcccgcgaaggcctgggcggcccccgcgccgacggcaaggccctggccgcaggcgacagcctcggctggctggccgatggcgcgcgaccgcgcgcgctgcccctgcccagcgaacggatcatggactgcaccggcgaagcgcgcctggagctgatcctcggcgcgcagatcggcgacttcccggccatgagcctgttcgatgcgttcaacggcgactggcaggtggatacacgcgccgaccgcatgggcgtacgtctgctcggcccgcgcctggaatgccggcagcagtcgatgatttccgaaggcatcgccctcggcgcggtgcaggtgccgccggacggtcagccgatcgtcctgctcaacgaccggcagaccatcggcggctacccccgtctcggcgccctcgccccgctggcgctggcgcgcctggcgcaatgcctgccaggccagcgggtgcggctgctgccgacggtgcaggaggcggcgcaccgcgagcatcgacgcctgctggcggcctgggacgcataggcggtttttttgaacggcgccgtatggcgagcgtccaccgcacactcgtcccgtccggaggttcgccatgcccagtcgcctgtcactgatcgccgccctgctgttgcccctggccgtccaggccgaacccgctgatacccgcgccctgctcgccgacagcctggccgacagccaggcccaggtggaggcagccgagcaagccatgcgccgttccgaaaacaaggcggtgcagctctatgccaagcgcgtactcaccgaacagcaggagttcgaccatcagttacgcgccctggccggggaaaaggccttggcgctgccctcgccgcgccagaccgaacggcaggccgccgctcccggcggcttcgacgagcgcggtttcctcgacgcgcagattcgccagcaggaccgtctggtcgcacgcttcgagggaatcgcccgggactccgccgatcctgacctgcgccgcttcgccgacgaatggctggcgcgcttctaccaccaccgcgaactggccgaccagttgcgtagcggccgcgccgactgagcgccgtgaccgccttgctcagtgccgcgcgaggacctgccgggcgctctggcgaatcaccccccagcgcttgggatcgtcctgcagcatggcgccaagcaggtgcttggcctgctcgaaactgatgtgcggcggcagcggcggcacgttcgggtcggtgaccacctccagcagcaccgggcggtcggcggcgaaggcctcggcccaggcggcgtcgatgtcctccgggcgatccacgcggatgcccttgaagccgagcatgtccgcataacgcgcgtaggggaaatcgatcacttcctgcgccgggctgaactccgggtcgccggccagggcacgctgctcccaggtcacctggttgagatcgccgttgttcagcaccagcacgatgaaggtcggcgagtcccagcgctgccagtactgctgcacggtgaccagttcggcgttgccgttcatctgcatggcgccgtcgccgaccatcgccaccaccggccgctgcggataggcgagcttggcggcgatggcgtagggcacgccgctgcccatggtcgccagcttgcccgacagcgagccgagcatgcccgggcgcatgcggatgtcgcgggcgtaccagttggtatgcgagccgctgtcgccgcagagaatcgcatcgtccggcagttgctccgacaaggaacggaatacccgctgcgggttgatcgggtcggcgggctcttcggcctggcgccgggcttcctcgcgactggccgtcaccgcccgctcgacccggcggcgccaggcgccgtgctttttctgctcgagcagcggcagcaggcgctccagggtttcccctgcatcgccgagcaaggcctgatcgatcggatagcggataccgatgttgcgcggatacaggtcgatctgcaccgcccgcgcctggccggccttgggtaggaactcgctgtaggggaaagtgctgccgacgatcagcagggtgtcgcaatgctccatcagcatgctgctggcgcgggtgccgagcaggccgatggagccggtcacgtacggcaggtcgtcggaaaccgccgccttgcccaggagcgccttggccactccggcggccaggcgctcggcgaccgcttccagttgccggtgcgcgcccagggcgccggcaccggcgaggatcgccacgcgccggccgcgattgaggatcgccgcggcggcttccaggtcggcgtcgcgcgcgtagggtcgcggctggacgaagcccaccgccgacatcacgtggccgtgctcatggggctggcgcttcggggccgccatctgttgcacgtcgttgggcacgatcaccgtcgccacctgccgctcgccgaccgccacgcgcagggctcggtccagcacatggagcagttgtgccgggctgaccacggtctcgacataggcggaaacgtccttgaacaagctctgcagatcgacttcctgctggtagtcgctgcccaacgcggtagccgcctgctggccgacgatggccagcaccggctggtgatccatgcgcgcgtcgtagagcccgttcagcaggtggatcgcgcccggccccgaggtggccaggcacaccccgacctctccggtgaacttggcgtgggcgccggccatgaaggccgccatctcctcgtggcgcacgcggatatagtcgaatgcctcggcgcgccggcccatggcgcccatgatcccgttgatgccatcgccggggtagccgaagacgcgcttcaccccccactggctcaagcgttcgagcaattgatcggcaaccgtgctggacattctcgcctcctggtcgtgtctggggtcgtaccagtgaggactggcgccgcgggcgagggttcaaggcaatcgagcggcggtgccgacggcgaaatcgactgaactgtcggcatcgtcgaccggcccaaggaacagggcccgcatgggcgcaatcgccaggaggtgccgccatgacccgcgccatcaacgatcccggaaacgaagaccccggctccctgctggaaaccgacgccgacgccctgctcggcggtgccgccgcccaggcgccggaagagcgctgccggctcgcagcccaggcctgcatccgcgcgtgcgagcgctacctggcgctctgcatcgagtccagcagggaacaacgccagcacgccggcgactgcgccgacctctgccgcctcgccgccctgctactggagcgccgcagcccatgggcgccggccgcctgcgagctggcggcgcgctatgccctggcatgcgcggagcgttgcgatggcgacgagccgctggagcgcgaatgtgcgggtgcctgccggcgcttcgtcgaggcctgtcggccgttgttgccggcctgaggctggccactttctgccctcgtgctgttgagtctgaatgtgctgggcaagctgatttccttgcctgccccggcttctcgtttcgccttcccaggcgagtcccttttgcaagcgtctgtacggaccggagacatagctgacaggtgtgcggggttgccggggaaagaccacgagagacgctatgagcctgagagaggagttcatttcgaagtcctgatccgtagggcgaataacgccacgggcgttatccgccgatgtcgcggataagcggcggataaccgcgagcggttatccgccctacggagctggagcggcagccggcgtttccgcaggcctgtagggcgaatacagccacaggcggtatccgccaataccccggataagcggcggataaacgcaagtgcctattcgtcccgcgacaaccacgccatcaccgctcggttcacccacggcggagacaactgcccagcccagtacagcgccgtgaacaacccgcccaccggccggtgtacccgccggctgtgcgcgtgccgccaggccgcctcggcgatatcctcggcgtccagtctcagccccaggcgacgcaacaccggcggctggtaggcctgcccggcgaccatcggcgtgcgaacgaacggcggcatcaggtcggccacacgaataccgtggcggcgccattccagctccagcgcctcggtaagcccgcgcacggcgaacttcgaggccgagtagacggccatctccggtacgccatacagccccgatgccgagcccatgttgagcacctgcgcctgcggcgtcgcgcgcaggaacggaaaggccgcgtgacagcagttgaggacgccatgcaggttgatcgccagcaaccgcgcgtggtcctccagggcgacctcttcgaagcggccgaaacgcaggacgccggcgcagttgaatagcaggcgcaggcggccatcggcacagaactgcgcaagcgcctcgccgaccgcgtcgggctcgctgacgtccacggcgcggtgccaggcgcccggcagttgcgcggccaagccgcgcaacgcctcggcatcgatgtccagcaaaccgacccgccagccccggcggtggaacagccgcgcgctggcggcgccgattccggaagcggcaccactgatcaggatgttctgcacctgtcgccctccgcgctgcattcgacgacgaacgcggccgcctcgtccaacgcccggtcggcgctggccaacacgccggcatgagcctggaacacgtgccagcaaccggcgtagcgctgcaatcgcaccgcgacgccctgctcaccggcccgttgcgccaggcgcaggctgtcgtcgcgcagcagttcgtcctcgccgacctgtaccagcagcggcggcagccccgccaggtcggcatgcagcggcgacaaggcggccgagcctggctccgcgtcggccggcagcagcaggcgcaccgcgctttccagccaggcccgcgacagcagcgggtcgccggccgccggcgtgtgcaggcgctggcagccgaggtcggtccagggcgagaacagcagcaacccggccggcaacggcaagccgcgcgccttcagctccagggccagggacagcgccaggtggccgcccgcggagtcgccggcgagcagcagccggcgcggcgaatggccggcctccagcaatgccaggtagaccgccagggcgtcgtcgcgggcggcggggaacggatgttccggggcgcgccggtagtccaccgcgcagacctcggcggcgcaacgccgggccaggtgcgtggtgatcgcccggtgggtcgccggcgagccgatcaggtaggcgccgccgtgcaggtagagcacccggcgccgcgcctccaccccgcgctgccgcaaccactcgcagggcacgccggcgaggctgcggcgctcgcggacgacgccgccggcgcccagcgtcgccaggctcagcccgcgcaacacgccgcgttgcagcgccactggcatgggcggacggaccagcccgcggaacaacaggcgcaggcagccgcgcaggagaccggcgcgcaggcgttgcggcggcgacatcaggggcgcttcagcgggccaggtcatagtcggcaagctccggccggcgcgtacgccagcgatagacgaaggtgtagcccggccagttgttggtgttcttgccggcggcagtcttgtaccagctgtcgcagccacgctcccagacggtatggcgcaacccctgttgcacctccaggttgaagcgccgctggacctcgggcttcacgtcgaggtagcgcaagccctgcgcctggagctggcgcaggcagccgagcacgtaggggaactggctttccagcatgtagacgatggagttgtgaccgaggttggtgttcggcccgtaaaggatgaacaggttggggaagccgctgacgctaatgcccttgtaggcttccgcgccatccgcccaggcctgccgcaggtcgcgtccgtcgaggccgaggatgcgcatcggggcgaggaactcggtggcggcgaagccggtaccgaagatgatcgcgtcgacctcgtgccggcggccgtcacggccaaccacggcgtcttcggtgacttcgcgaatgcccgtgtcgaccagttcgacattgctcctggccagcgccgggtaatagtcgttgctgatcaggatgcgcttgcaacccagagggtagtcgggaaccagccgcgcgcgcagttgcggatcggcgatctgccggtgcaggtgacgatggaagctcagccgcatcaccttcatcagcgccgggaaggtcgcgaaggcgagcatccgcgattcgtggtgcaggtacttgagcccccgatccagacgttgcagccacggccagcgcgccttcaggcggcgttcccagtcggcgtaggcgcggtccggcttggcgatcacgtagggcgcgctgcgctggaacagcgacaggcgttgcacctgcggggcgatccgcgggacgaactggatggcgctggctccggtgccgatcaccgcgacccgcttgccggccagctcgacctcggcgtcccagttcgccgagtggaacgccggaccctggaagcgctccaggccgggcaggcgcggcagcagcggccggctcaactggccggtggcgcagaccagggcccgtgcgcgcagcgtctggccatcggcgcagcgcacctgccattcgccgctgccggcgtcgaaacgggcctcctccacctcgcagtggaaacggatcttctcgcgcagacggtacttgtccgcgcaatgccgcaggtagtcgaggatttccgcctgcggggcgaacttgcgcgaccagtcggccttcggctcgaaggaaaacgaatagagatgcgaggggacgtcgcaggcggcgcccgggtagcggttttcccgccagcaaccgccgacgtcggcggccttttccaggatcaggtaatcgtcgatgcctgcctggcgcaggcggatcgccaggccgagaccggcgaagccggcgccgaccaccagcacccgcaagggggcttcagggcgggactcgttgtgcattgttgtgctcccgtttgttgcttgccacgccgtccggcgcgattccgcccagcggcggatggcagcatcctagttcgccggggcgactggcgttatggccgggccggacataaagttgtgattttcggtcaacctcggacgccaccatgcccactccgccctggtctccccgccgcagcgccatcagcgcgcacctgctgatccagttcggcatcgaccgcggcctcggcctggagcagtgcctggcaggtagcggcctggatatccgcctgctcggcgatccctccggggaaatcgacgcggcccaggaactgagcgtagtgcgcaacctggtccggcacctgggcgacgcctgcgcgccgggcctggcggcaggcctgcgctatcacctcaacgcctacggcatctggggcttcgccctgctcagcagcccgaccttcctcagcgccgcgcaactgggcctgcgctacctcgacctgaccttcgccttccatggcatccgcctggaggtacacgacgatgaagcgcacctggtgctcgacgacgccggcattcccgaggacctgcggattttcctcctcgaacgcgacgccggtggcgtgctgcgcatccagcgcgacctcaccgggcagcgcctgccgatcctccgcgccggcttccgccgcccaccgcccgccgatcccgcgccctacgtgcgcgagctgggcctgtgcccggcgttcggccaggcggacaaccgggtggtcttcgaacggcgcttcctcgacctcccgctgcccggcgccaatccagaggtggcgcgcgcctgcgaggagcagtgccgcgccctgctcgctcgccgccaggtgcgcggcggtctggccggacgcatccgcgaccgcttgctgaggacgcccggccacttgccggacatgcagaccctggccatggaactgcacctcaccgtgcgtaccctgcgtcgccgcctggacgacgagggcagcagctaccgcctgttgctcgacgaggtgcgccaggccctcgccgaagagctgctggccaccggcgcgattcgcctggaggagatcgccgagcgcctcggctacggcgaggtgtccaacttcatccatgccttcaggcgctggaaaggcatgacgccgcgccagtatcgccagcggcgacgactcgacgcgatgtcctgagccgctccgggcttattccacgaaggcaggacgccagcgcccgatgttcgtttcgccgccgcctgccagcggctagattggccgttcacgcgcggcatccggcggcgcggcagcggaggcatctccgctggcaacgggagaacgacacatgggttgccagcaacacgcatggccggcgcacgcgccggagcaggtcgaggccgaggtcaactatatccgcgacaacggccaacggccggtcgcctacacctatccggcccctgccgggacgccgcagcgcagcgcgctgttgcagccgacccgggtggcgatccgcaatgcgcgtctgctggcgcaaccggccagcctggagcgcgagggtttccaactggtgcgcgaggcgagcgcggtgggcgatttcgaggatgaagcccaggttcgtgaacgctactacccggaaagcatcgccctgctccgccgcctgaccggcgccgccgaggcggtgatcttcgaccacacgctgcgcgtcgaccaggccgggcgcgaagaacgcggcctgcgcgaaccggtgcgctacgtgcacaacgaccagaccctgcgctcggcgccgcgccgggtccgcgaccacctgccggcggaacgcgccgaacggcgcctggccggacgcttccagatcgtcaacctgtggcgtccgttcggccacccggcgcagcgcgcgccgctggcgttgctggacgcccgcagcctggcgttcgacgacctggtggccagtgacctggtgtaccgcgacaaggtgggcgaaacctactcggtcaagcccaacccggagcaccgctggtactactacccgcacctgctgccggaggaagcgctgctgctgaagatctacgattcgcgggaggacgcgcaggcccgcctcggcgcgcacaccgccttcgacgatccctgcaccccggccgatgcgccgccgcggcagagtatcgaactgcgttgcctgctgttcttcgacgaatgagtcaggcggggcgcaggctgatccagtagtcgctgtagcgcagcacgcggatcggcaggctgcgtccgagcatgtccagggacgtgtgcatgtcgtccagcgggaacagaccgctgacgcggttgccggcgatctccgcgtcgagctggaggatgcctggcagatagggccggaaggcctccgcgacccaggccagggagcggtcgtggacctccagccagccgctggcccaggcatcctctccggcctgcatcgggccctgttcgagcaggccgccggcatcgaacagcaggctacgtcgtgccgccaccgccagctggcgtccctcgccggtggtcagccgcgcgctgccgcgcagggtcaccaggcggatcgccccgcgctcctcggccagcagcaggctgccgctggcgcagtccacccgtccggcggcgcagtcgagggcgaaggcgccgcgcgggtcctccttcacttccaggcgcatcgcgccgcgccgcagctccaggcgtcgctgggcgccgtcgagcagcggtcgcgccttgctccgcgcgttcaggcgcaggcggctgccgtcggccagcaaccagtcgcgacgctcgccggtgccggtcgccagttcgccgggcagacccatgccggcctggacccagcgctccaggccggcgccgccggcgagcaggacgaacagcccgagggcgccgccgacgaagcgccggcggctcgacggctgctccagggcgcgcagcacggtagcgctcggctggccgcgccagggcgagtcctgtagcggcgcgaggctgccaagcagttgccggaacacctcggcatgctcgctcgacagcgccttccagcgttccagggcatcgccctcggcggcgctgaagtcgccggattgcaggcgcaccatccattcgatggcctcctcgacgatgcgttgccgttccggcttctcgctcattcctggaatccccggtagcagcagtgcaaggcatccttcatcaactggtggatgcgccccagggacaatccgaggcgttcgccgatctgcacgtaggtcaggccttccagctggctcatcaggaacactgccctggcctgcccggacaggccgtcgagcaggcggtcgatggcttgcaggctctcgatcagcatccactgctcgtgaggcgacggctgcaccgcctccggcgcctcggcgaggatctgcaggtaggcgcgctccaggtccttgcgccgccagctctcgtacatcaggcgttgcgcgatggtcgcgaggaacgcccgcggcgagcggatcgacgccgggtcggggagcatccagacctgcaggaaggcctcggcggcgaggtcttcggcgctgtggctacagccggtctggtaggacagcttcttgcacagccagtcgtagttctgctggaacaactgggcgatcagggtgttcttgatggagccttggctatccatggtaagcgttcgctgctggcaggccacgccacggatagcggtagtgagcctggaggttgaggaacggcgcccggggctgttcccgtggcgcgcggtagggaatcaatcgaggcgctcccggcagtccgccgtgcccgccggccgctgcgcggacagccagccgcaggcggcggcgccgaggatcagcgcggcgccccaccaggggagcgcgcgcaccgccacctggtccaccaggatcgcgccgatgaaggcgcccagggccacgccgagctggatcgcgctggtgttgaggctgatctggatcgccgcggtgtccgggctgagttccaccaggtatttctggatcgccggccccggcgccatgttgaacacgcaccagaacaccaccgcgcccagcagcagcggcaggccgccggtggcgaacggcagcaggaccagggccagtgcgtgcaggagcaggaaggcgacgaaggtggccggccccggccagcggtcggcggcgcgtccgccgagcagcgcgccgaggatgccgccgcccccgtagaccagcaggaccaggctgatggtcggtttgtcgagggccatgctgccgaccaggaacggcacgatgtaggtgtagacggtgaactggccggtcatctgcaacagcgatgccaggtgggcgaacggcacccggccccgggccagcgcccgcagttgctccgccggggcgatgccgggcgcgccggggatggccggcagcaggcgcaggagcagcggcaggccgagcaacgcgaccccggcgagcagcaggaacaggctacgccagccccagaactcgccgatcagggtgcccagcggtacgcccagcaccagcgaggcgacgatgccggcgaacaccagaccgatcgcccggccgcgccgttccggcgcgacaatggccaccgccagggtgatcgccaccaccacgatgaccgaggcgctggccgccaccagcagccggctcgccagcaacagggcgaagctcggcgcggcggcgctggccaagttggcgccgatgaacgccagcagcgcgccggccagcaggcggcggcgctcgataccggcgctgaggtagaccagcagcgggccgagcagcgcatagaccagcgcgtacaggctcatcagcaacccggcccggccctggctgacggcgaaactggcggccagttcgtcgagcaccccggccaccaccagttccaccgtgccgaccacgaaggccagtccggccagcagccagacgccgacctccgccctgctccgttcagtctcgcccatggctgcgtgcctccccgtcgatggcgtagcgatagcgcccgagcatgaccagcagccctgccgccacgccgaacgcgccgagcaggaccagcgtcgagcccgcgtaggagcccgcgcggtcgtagaagtaacccagcagccaggaccccaggctgatggcgatggcgaaggtgaagggttggatcgagccatagatcacgctgaaatggcgcaggccgaagtagcggctgacgaagtactgggtggtgccggtctcgccgccggcgcccaggccgatcaggaacaccgcgccccagagcagcgccggcggtccgccaaggagcaggagcagcagcccgagcgccgccagcagggcgaacggcaaggcgatgcgcggggtgtcgtagcggtccagcaggtagcccagcgccggttgcgaaacgatcatgccgacccacagcgccgccagcacgtcggtggcgacttcccgcgacaggccgcgctcctgcaacagcggcacgccatgcaccatcacgccagtgacggcgaacacgccgaggatcaggttgccgacgatcagccagaagtccgccgagcgccaggcctggcctggcgtcgctccgggcagcgcgtcggctggcgggcgcagcgcctgcggcaggtcgccgggtcgctcgcggaacaacgcatagagcagcggcagcgccaggaggccttcgagcaggccatagacgaggaaggtggcgcgccagccgaaggcgtcgatgcaggcgctgcccaggtacagcgccagcggcccgccgacgccgaagccgagtccgaggatgccgtaggccgcgccgcgacgacgctcgaaccagccgccgagaatccgcgcatagggaatgttgcccggcgtcagcaggccaagcagcgcgaacagcaggtatagctgccagccgctgcgcgccagcgccaggctggccaggcacagggccagcgcggcggtcagcggcaggaccagggcgcgcgcgccccagcgatccaccagccagcccttcagcgggctgctcagggctaccgccaggcccagcagggtcaccggcagcgccgactggccgcggtcccagtccaggtcggcggcgatcggctcgatgaacagcgagaagctgctgatcaccagcccggtggggccgaagatcactcccactaccgaggccagcagcaccccacaactggccacgccgaactcgccgacgccaggcgccggcgcgacgtcctccatggcctcgcgggcgacgccgctcatgcgtcgcgcctcaggcgctcgatcagttggcggcgcaagcggatgtcctcggcgttctcggtggtggcctcgagctggacgatctcgatgccggcgcgatgaaaggccaggatctgttccgccacctcgccgacgctgcccaccagcaccccggcgaagctgcgctgcacggtattcgccacccattcgcgcaaggcctccggctccagccgggcgagccggtcgcgctcgccgtcgcgggcgacctgcggcgatgccgccagttcgtcgaggggccgtgccagaagcagttcgaaagcggcctggcggtagtgctcggcgatgtccagggccgccgccggactgtcgccgaggatcacctggaagtgcttccagaacttcagccgccgtccctgctccgccgcctcctcgttcagcctgcgcttgagctccgcggtctgcgtggggctggcgaagtggccggcgtagacgtcggcgaagcgcaccgccaggcgttgtgcctgcgccgaggagccgccaacggatagcggcgggcgcggccgctggatcggcaggaagccgctgccggcgtcctccagccggtagaactcgccgtggtagtcgaagggttcgcggctttccagggcgcgggtgaagacctccaggtactccacggcgcgccggtagcgttcgtccttgtcggcgaagtcgccgtcgcggcgcacgtcggcgtcgctggagccgatcaccaggtgtacgccggcgcgcccgttggacaggccgtcgagagtggccagggcgcgcgcggcaacggtcggctgggcgctccccggtcggtgcgcgacggtggcgcgcaggcgcggcgccgcagccaaagcccagccggcgaccagccaggggtcgggccaggcagcggaaacggtgaacagcgcgccgtcgaggccgtccgcctcttccaggcgggccttctgctggatgtcgaaggcgctcaccgcgcgactgcgggtgtccggcaggaaacgcgcggcctggcgggcgaaggcactgtcgccgatgaccgcggaggcgcgcacgccgccgcgcagttcgatgctcatggttcgtcctccttagaaggtgtaggccgcgccgaggtagtagaaggcgccgttgaagctgatctgcgaggcataggtgtcgtactggttgaagccgaggtaggcgctctcggccggcagcttgtcgggcttcacgtcgaacagattgttggccccggcgctcagggtcaggttgcggctcgccgcatagcgcagggcaacgtcggtgatgtacttgggcgagttctcgaagcggttgaagaccgtggtcgaataggcatgctcgccggtgtagtagtccagttcggaaaccgtcttgctgtagcgcgtttcgcgcagggtcaggccccagcgccggtagctccagtcggcctgcaggctgacctggctgcgcggcgtggagctggtgatccaggcctgctgctggtcgttgagcagcggctggccgttgcgcccgcgatgattcctgaccagcttcgtgcgattgacgttggcgcccaggcgccagtcgatccggccccactcgccgagccgggtcaggtagctggcggtgaggtcgaggccgtgggtacgggtgtcggcgccgttggtcatgtagtgggtgctgacctgggtcagtccggccgggatgctgatcccgccggcgcgcagcgcatcgatcgccggctgtccggaataggtggcaccgtcgacgatgcggtcgcggatctcgatgcgataggcgtcgatggccaggttcaggtccggcaagggatcgagcaccaggccgaggttgtagctgatcgatttttccggctccaggtcttcggcgccgagcagcctggccgccggcgagttgaccgccagcaggccgctggcgatggtcggcgagacgcccaggctggtgtagttctcctgggccagcgacggcgcgcggaagccgctgctgagactggcccgcgccgatacctcggggctgaagcggtagcggctggcgagcttgccgttggtggtgctgccgaagtcgctgtagtgctcgtagcgcgccgccgtctccagttgccagcgctcgtcgagggcgatggacaggtcgagataggcgccgagcacgtcgcggctccactgtccggcggtggccggcgcctgcccggggagtgccttggaaccgccgttgtagtaggaccagggatcgccggcctcgacctcgtagagctcgcggcgctgctccaggccccaggagaaattcagcggcgccggcagccaggcgaggtcgaagtcgcggcgcaggtcgagattgttggtccactgggtggccttgtagcgcgccaggtcgaaggagcgcggcgaatcgccggtctcgccgtagagggcgaggttgatcgaatggtccatgccgatctccgggcggtcggcaccgtaagtcgaactgaggtcccagtcccaggcgccgaacagctcgccgccacgggcgccgagggtcagcgaatagtcgtcctcgtcgctggtgatgcgcggggtgaagccgttcggatagagtcgcggcgccagggacggcaactggtagatctgcgccgaggacaccgagcgatgggtataggtggcgaagctgtacagctcgacgttgtcgtccagcgccacgccggcgttgtaggccagcgcctggcggtgcagcgaagggtcgccgatggacgggttgccgtagtgcccggtacgctggtcgatgccggcgcggatggtccgcgcctgttcgcggaactgcgcgctgaggttgaggaaaccgctctcgccgaaacgcaggccgccattcaccccgccgttctgggtcaggccgtcgccatcgccgtagcgaccgttgtcgtaggcgagccggccgccgtggtcggccgacttgaggatgacattgatcaccccggcgatggcgtccgagccgtactgcgccgaggcgccgtcgcgcagcacctcgatgcgctcgatggcggcgagcgggatggtatccaggtcgaccccggtggagccgctctgcagcccgccgctgacattgatgttggcggtctcgtgacggcgcttgccgttcaccagcaccagcacgtggttgggactcaggccgcgcagcgactgcgcgttggtcagcgccgaagcgttgtaggcctgggcctggcgcgacagcgagggcagcaggcgcaccagggcgtcgcgcaggtcgccgctaccactgtcgcgcaattgctcggcgctgaccacatcgatcggtgccaggctctcgccggccttgacatcggccttgcgggtgccggtgaccaccaccgtggccagggtcccggcgggcttcgccgccggcagcgcggcatccggcgccgtggcgcgttgcaggctgagcacgccggcggcgctgcggctgtattccaggccgctgccctgcaaggcccgctgcagcgcctgctcgacgctgtaggagccctggatcgccggtgccggcaggccctccaccaggtgctggtcgaaggcgatcggggtgcgactctggcggacgatgctcagcagtacctgggccagttcgccggccgggatgtcgaagcgctggatctcggcgctgctggtggcgcggacctcctctgccgccgactcgccgggctggccaaggcaggccaggccgaccgcgcagagcacggggacaagtcgaagacgtggcgaacgcgggttggacatggtcggttcatccttgatcggttgcggatgccaccgagtgcaattgcccgtaccgattttcagccgcgcggcagaccgattgcgcataaggttatgcctcgccctcccgagcccggcagcgccagacactgaccgggatttcgctgacctgtccgtcggcctgcatgcgccgctcggcgatccgcccgaggcggacgaagaattcctccaggcgcgtcgccggcaccagcggtgcgaaataggtgccgaaggtggcggcgtggaaacgctggtattcggcggagtcggcgacacgcaggaccgccgggcgggagacgatggagtcgacccggaagtgtcgttcgacgcgttcgcgcaacgcctcccggccacgggtgcgggtgcccatcggcagcagcccggcttccgcgtagagcgccgccacccgttccggcgcagccaggcccatctcgaccagggcctgggcgaccaggtcgtcctcgccgccgaggccatcctcggcgaacggatggtgcgaggtgaacaggaataccccctgcgcctcaaggtgccgcgcgacccaccggaacagccgctcttcatcgggatacagccagtgcagcacggcggtcatgctgatcagctcgaagcgttccgccagcggcggcaggtcgagcaggtcgccctccagcagacgcgcctcgacgccagccccgcgcaactgcgcgcgcgcctgctccaggcgtagcggcgaacgctcgatgccccacaaccgttgcaggccgggccagcgccgggcgccgccgagcagcagcgagccgatgccgcagccgagatcgagcaggctgcgcggctcgatgccggcgcggtcgagcacccagtcctggtcgcgacgttgcagcagttcgctggaatcctggtagccgtccaggctgcgcgcctgttcaatgatcgcgttcatgtacgcctgctccttggttgaggctgtccgccgtgatggtccatacgcagccgtggccttgcggctcttcgtagagccgccagtcggcgcggcaatcgctggcggcgacgaacgccgacagcagcttggtgcaataggtgcaggccgactccagggtgatcggcacgcctcgggcgcgggcgcgctcgcggtagtcccagatcgcgcagtgacggttgtggaataccgcgcgcccgtcagcctcggcctgcacctcgaaacgcgaaccgtagagcgcggcctggcgtgccagacggtcggcggcgctggccggatcgccccgccccgccggttccagcgcgcgatagatccgcgcggtggcgcgcgcccagtcgtcgagccggtaatccgccgggcgcgcgacgatgaactgttcgatcagcgcctgggcgcggaagaacaccgcctgccaggcttcggcgcgcaggtcgtcggtcgccggcagatcggcgaatatccgcgcgctggtcgccacccagtcccccaggtcttcacgccgatggcgctcggcgacgtaggcggacatcgccgcgtgcacctcgaacacccgctgtcgccagagcgtcgcctgcgccgccggatcgcgttcgacggcgctcatcggagcgcctcccggtggctggcgagaaaccccagcaggtgctccagcacggcgtccggcgcgtcctcgggaagcatgtggctggcgccgatggcggcgccctcgacctgcccggcccaggtcttccagatttccagcggatgctgcccggcggcgtaggggcgctcctgccagagcacctggaccgggcattgcaggcgccggccggcgtcgcgatcggcctggtcggcgtcggcatcgacgcccaccgcggcccggtagtcctcgcacatcgcatggcgcacggcggggtcgcggaacgcccggcggtaactttccagcgcctgcgggtggtagatgtcgcggccctgggccatgcgtcgcagggtgtagtcgaggaagtgctccggatcggcgccgatcaggcgctccggcaggtcgtacggctgggcgaggaggaaccagtgataggcgttgagggcgaaggccttgttcaccgcggcccagttgtcgaggatcggcaccacggtcagcgagacgaaggccgcgaccgcttgcggatggtccagcgccaggcgatagccgacccgcgcgccgcggtcgtggccgatcaccgcgaagcgttcgaagcctagctggcccatcgtttccagttggtcgcgggccagcgcggccttggaatagtcggcgccctcctcgtccagcgcccgcgattcgccatagccgcgcaggtcggcgaggaccacgctgtagtcctcggccaggcgcggagcgatgcgatgccaggccaggtgggtctgcggatagccatgcaacagcagcagcggcgggccgctgcccttcacggcgacgcggaggcgcgcggcggaggtgtgcagggtcaggtagtcgaagccgggcagcaacggatcggtattcataggcggcgcctcacaggatgatgctgatacgccgctgggcgctgatggtctcgtggtccaggcggatctcccgcgagacgatgcgcaagcccccggggccgtcgcgcaggacatgactggcttcgccgacgaagctccaggcctcgcggttgcggaactgatggacgacgaagttgctgcggctgctgaccagttcgccctcgacccgcttcagccgcacgttgcccaccaggcggcgggtgcgcgagcgcggctgctccatccaggtatgcccgccgaggatgctgtcgacccgctcgcgcaggcgcacgtggtcgtcgtcgatgatgtacaggctgtcctccggcgcctggccggccagttgctcctgcaagggcagcacccggtagcgtgcggcgcgctcgaacagcgcgaaccaggtatccagcaggcggtcgtcgagcagctcggcttcggcgacgaggaaatcgctgacccgcgccagcaggtcgctgtcgggacgggacaaggcaaggctcatgagtatcctccgggaagaaagtgccgctcagaggctgatgtcgaccccatggcgggtcagccagcggtccaggttcagcaggtaggccaggccggcggtcgggctcgccgaggcacgcgggctgggcagcggcgtgccctgttcgagagcctggcggacccgcccggcgtccaccagttcgaacagcggcgagcggccgtcgtcgagcaggcggccgacccgctcgcgcagcagcgccaggtaacgtgggtcggggttggccgggaaaccgctcttgcgccgctccaggatcgcctgcggcaggtgcccgcgcagggcccggcgcagcaggctcttgctttccccggcgacgctcttcagcgcccagggcaggttccatacgtactccaccaggcggtggtcgcagaacggcacgcgcacttccaggccgaccgccatgctcatccggtccttgcgttcgagcatcgccggcagccagcggctcagcgccaggtaggcgacctcgcgctggcgtcgctgggcggcatcctcaccatccagccgcggcacttcggcgagggcctcgcggtagcgcgcccggatgtattccggcgccgccacccgttcggcgacctcccgccgcagcagttgccagggcccgctcttgccggccagccaggggtagccgtcgtgtgcgagggcgctcgggtcgtggaagaacgggtagccgccgaacacctcgtcggccgactcgcccgacagtgccaccgtggtgtgctcgcggacctggcggaacagcaggtagagcgaggcgtccagctcgccccagccgggcaggtcgcgggcctggagcaccgcctcgtcctgttccagcacctcttccggggcgaccagcacggtacggtgcggcgtaccgaggaagttcgccgccagctgcgcatagggttcgtcccagctgctttgccagggcgtcgggacgaagccgcggccttcgccggggaagtccacggagaaggtcggcaggcgccgcgcgtcgccatccagcgcggccaccgcgaaggcgctgatggcgctggagtcgagcccgccggaaagcaggctgcccagcgggacgtcggccaccagttgctcggccaccgcctcgcggagcaactggccggcgcgttcggcgctgtcctcggcgccctcttcgtgacgttccgcgcgcagcgcccagtagaccaactcgcgcacaccattgcggtcgaagcgcagcgcctggcccggccggacctggcgcaggcccttgtacaggccgtggccgggagtcggcgcggtggtcagggcgaacagctcggcgatgccgctggcgtcgagcaccgggttggcctcggggttggcgaagatcgccttgggttccgaggcgaacagcacgcctccggcggtcgggtagtagtacagcggcttgaccccgaagcgatcgcgcaccagccacaggctctgctcgcgctcgtcccacagggcgaagccgtagatgccgcggaggcgggcgaaggaagcctcgccccattgcagataggcgcgcagcaccacttcggtgtccgagcgggtgcggaagacctggcccagcgtctccagctcggcgcgcagctcgcggaagttgtagacctcgccgctgtaggtcagcgccacccgcccaccagcctcggcaagcatcggttgagcgccgttctccaggtcgatgatcgccaggcgccgatggccgagcagcgcgtgccgcgacagccacaggccttcggcgtccggcccgcgcggggccagggtacgggtcatgcgttcgaggatgctgcgctgctcgccgaggtcgcggctccagtcggtccagccggtgattccacacatggatgacgttccttgcagtgaccctttattccccgcgtagccagggcggcgcgcagggatctgcagggagcgatggttgaagacggctcagacggccacggcgagacgccgcagggcggcgggctgctgcccgagccggcggctccactcgcgccagaagccgcggttctgctcctcgtcgacgtggcggcgggttgccggtcccatgccgcgggaaaaatcgctgtagccgagggcggcgtgggcgtaggcgcgctgacaggattcgaggatctcgacgtcgtcaggggtgccgaaaccgcccgggccgatgaacgagatcaacccattgatccgcgccgcccgctcctcgcgggtctcatcggcgaagccggcgccccatacggtgacgctgacctcatcggcggcagtcgggaagaacgagcggatgttcaggccgaggatgtcgttgatcaccaggttgggaaagatgaacaggcttttgttggtgtgggcgatgtcctctgcccgcgcctgcccgaagcgttccaccaggcgttcgaacttggcggcgatggacggcttgagcgcttccgggaacaacgggctccagtaggcgatcggccgtccggtggacggcgggccgctgatgatcagcgcgtggccgttgcccagcgcctcgccgcgaccgtggcgcttgtgcgactccggatcggtgccgagggtattcaggtattccaggtagcgcttgtgggcgaacggcaggtggtaggcgtccacgccgttttccgcgagcagcttccagttggccttgatcgaatgctcgaagccaccggggatgatctccagttccgcctcggactggtcgcagatcaggtcgatatagtccttcgcctggcccaggtaggtttccagggacggttgccgggcggcgtagtggatgaacaggaagttgcggtagaccgcgtgtttcacccgtgtcagggacagctccggatggcattgcccggcatgctggtaggcggccttgtccggcaggccgatcaggctgccgtggctgtcgtaggtccagccatggtagggacaggtgaaacgctggctgttgccctggcgctcggcgcagaccttggccccacggtgcgcgcaggcgttcaggtagaccgccggctcgccatcggcgcgacgctggatgatcaggttgcgcccgccgacgtcgcgggtgatgaagtcgccgggctcgcgcagttcgctgaggtgggcggcatacagccagctgtcgtcgaatatctcgtgcagttcgcgccggtgcagttccgcggaaacataggcctggcgcctgacccggaagtaacttgcgtcgtcggtctcgatatattcactcaccgcctaacctccgtgtaacgttgacaacccggcaacggggacggaggaaacctagcacggggaaaatcaattccggcagactatttattcattagctaataactcgtaaccccatgaaaaaagacaaaataattatttccctcgacgactgaaaattcctcccgctcattgcactcatgcttttatgaggggtcgccccgttcaactcttcaggttcaccaggtcgagcaggtcggcaccggccttgatctcctgcaggacgatttccgagcggatatcggtgacgccggcggcgcggttcagtttgttcacgatgaagtccgaatagtgcttgaggttgcgcgcccggacccgtagcacatagttggtggcgccggtcaccacataggcggtgaccacctccggccagtcccggaccctggcgatgaacgcctcgtgccaaccctcgacgtcctggcgcagcgacacatggacgatggcttccagctccacgcccagtcgctcggcatccagttccaccgagtagccgcggatgatcccctcgctttccagcaggcgcagccggcgcaggcaggcggatggcgagagggagaccttctccgccaggtcctggttgctcatccgcccgtcctgctgcaggtgacggagaatgcgcagatcgatggcgtccagggacatgtgcaattcctatcagaatgaatagctatcttcgaattttgtgcgaacagattgccatgcgaccttgcatttcgcacgaaaattctccgaaatctcgttcattatcattcgctggacttccggagaaaaacaatgacttcgctccgctactgggacatcagtcccgccctcgacccgaacacgccgacctggcccggcgacacgccgttccagcaggaatgggcggcgcggctggacgagcagtgcccggtcaacgtcggccggatcaccctttcgccgcataccggcgcccacgtcgacggccccctgcactaccgcgccgacggcctgcccatcggccaggtgccgctggacatctacatgggaccgtgccgggtgatccactgtatcggcgctaacccgctggtgacccccgaacacctcgccggccagctcgacgacctgccctcgcgggtgctgctacggaccttcgaacgggtcccggcgaactggccggaaggcttctgcgctatcgctccggccaccatcgagtgcctcgccgagcgcggcgtcaggctggtcggcatcgacaccccgtcgctcgacccccagcactccaagaccctcgacgcccaccacgcggtgggccgccacggcatggcgatcctcgaaggcgtggtcctcgacgacgtgcccgccggcgactacgaactgctcgccctgccgctgaaattcacccacctcgatgccagcccggtgcgtgccgtgctgcgcgccctgcctaccgcggagtaaccgatgaccactcgagacgactgcctggcgctcgacgccggcgatcccctggccgacctgcgccaactgttcgccctgcccgacggcgtgatctacctcgacggcaactccctcggcgcccgcccccgggccgccgtggagcgcgccgccgaagtggtcgccgcggaatggggcgaggggctcatccgcagctggaacagcgccgactggcgcggcctgccggagcgcctcggcgacaagctggcgcccctgatcggcgcgcgcgccggcgaagtggtgatcaccgacaccacatcgatcaacctgttcaaggtgctcagcgccgccctgcggatccaggaggaagacgcgccagggcgcaaggtgatcgtttccgaatcgagcaacttccccactgacctgtacatcgccgagggccttaccgacatgctccagcgcggctaccggctacgcctggtagatgacccggagcaactgccggcggcgatcgacgcggataccgcggtggtgatgctcagccatgtcaactacaagaccggctacctgcacgacatgcgcgaggtcacccgcctggtccacgaaaacggcgccctggcgatctgggacctggcccactcggccggcgcgctgccgctggacctgcacgcggccgacgccgactacgccatcggctgcacctacaagtacctcaacggcggccccggctcgccggcctacgtgtgggtcgcgccgcgcctgcgcgagcgtgtctggcaaccgctgtccggctggttcggtcattcccgccagttcgccatggagccgcgctaccagcccggcgaaggcatcacccggttcctctgcggcacccagccgatcacctcgctggccctggtcgaatgcggcctggatatcttcgcccggaccgacatgcagcgcctgcgcgacaagtcgctggccctcgccgatctgttcatcgaattggtggaaagccgttgcgaacgcttcggcctgaccctggtgaccccgcgcgagcatgcccggcgcggcagccatgtcagcttcgagcatgcccagggctacgccatcgtccaggccctgatcgaccggggggtaatcggcgactaccgcgagccgggcatcctgcgcttcggcttcaccccgctgtacacccgcttcgtcgaggtctgggatgcggtgcaggcgttgctggaaatcctccagagcgaagcctggaaagagccgcgctaccaggtccggcacaaggtgacctgagtcccgcccgcgcggaccgcgccggtactcccggggcggcccgcgagcacccaccgctctcgcgcacaggagcccgcgaccggcacccgcacatcgccaccgacgttccctcggcaattcataagaaccccaataagattccagaggacatccagatgaacgacccccagggcttcgaggccatctcgcgccgcgaacagggcctgcaacggcggctctcggccgcgcagatgagcatgatcgccatcggcggcgccatcggcaccggcctgttcatgggcagcgccttcgccatcggtttcgcaggccccagcgtcctgctcagctatgccatcggcgcgctgatcaccctgctgctgatgggctgcctggcggaaatgaccgtggcccatgccacccccggctcgttcggcgccttcgccgagcactacgtcggcccgctggccgggttcctggtgcgctacgcctactgggcggccatcgtcctggcggtgggcaccgaggtcacggcggtggccatgtacatgaagtactggttcgccggtatcccggaatgggtctggatcatctccttctcgaccctgctgatcggcctgaacgccagcagcgtgaaagccttcggcaacttcgaatactgcttctcgacactgaagatcgccgccatcgtcgccttcatcctgctcggcgcctacctggtgttcggctccgccaacccggcctacggcgtgcacaactacagcgcccacggcggcttcttcccgcacggcctgaaaggcatgtggatcgccgtggtggtgtcgatcttcagttatctcagcgtggagatgatcgcggtcgccgccgccgaggccgaacatccggaacaggcggtgaggtcggcgttccgctcgaccatcgtgcgcctggtggtgttctacctgctgaccctggcgctgatgctcgccatcgtcccctgggaccaggccgggcagagccagagcccgttcgtcacggtgatgcaggcgatcggcctgcccggcgccaccggggtgatgaacttcgtggtgctggtggccgcgctgtcggcgatgaacagccagctctacatcaccacccggatgatgttcagcctgtcgcgcgcggggcacgcgccgaagggcctcggcgaactgagccgccagggcgtgccgctgaacgcgctgctgctgtcgagcgtcggtatcgccctggcgaccctgctcaacctggtctaccccgagcagtccttcaccctgatgatggcggtgtcgatgttcggcgccctcttcacctggctgatgatcttcttcacccacctctgcttccgccgccaccgcgcccgccacggcggcgcgccgctggccttccgcatgcgcctggcgccctggtcgacattgctcggcctggcgctgatggcggcgatcctggtcaccaccttcttcaccgaggcgttccgcatgaccctggtcttcggcgtgccgttcctcgcgctgctcagcgcactctacctggtcttcgtccgcaagcccggcagggattgtccgatagaacgggcaacgccctaggcgctctccgccctgcgaacctggcgcgcacggcgaagcccgaccggcgcgccctttccggaccgggcggttccgtttcccataccttttccgtcgcacaaaaagcattacccgccggccgccgcgactccgtagcgtagtgcccaaccggacgttccggcccgcggcgcgccgcggccggcgcgctcccgtcagggacgaagtggcggcacgcccagccatcgagcgcactgcatcgctctgccctgtggggacgcagacgtcgtcagccatgaggggaacacgatgcatccgaccttttcgcgggtcctgctggccgccgcactggccgccgccggcagccctgccgtcgccaccgaaatccagctcgagcaaggctggaacgccgagcaacgcgcctcctggtacgacgcctcgctcggttcgcggctgctgccgctggcctgggcccaggcgctggagcgtccggacagcgaggagcgcctgttctccgaagacaacgcccggcgcctcggctttcccctgcgcaactggcaaggcggcgaactgcgcctgccgcgcggcttcgccctcgaccagcaggacgacagccagttctccgacacccgcctgcgctggaaagcccgccagtcgtccagcgaaccctgggtcgggctgaattgcgccggctgccactccaccgacatcagttaccgcggcagcgaactgaccgtcgacgccggcgccaccctggccaacgtccaggcgatcttcgacgaagtgctcgccgcgctgcgccgcaccagcgacgacggcgacaagttcgcgcgcttcgccggcaacgtcctcggtagcgaggacagcccggccaaccgcgagctgctgaaggccgccctggtcaaacgcgcggcgctgatcgacaccctgctgagcatgtccgcgaccgacctgcaacccggcccggggcgcctcgacgccaccggccagtcactcaaccgcgcggcaatcaactccggcgcccgccatctgcaagcgaacccgaccgacgcgccgaccagcttcccggcactgtggcacacgttgcagatggacaagctgcaatccagcggattcgtgcccaacgtcaaggtcctcgatctcaacggccaggtcttcgacctcggctacctggccggcgacatcggtgtggtccagggcgactacggcgacgtggtcagccatccgctgtccggcctggagggctatatatcgagcatccgcgtggacaacctgacccgtgtcgagggcctgatccacaagctcaaggcgccggcctggccgagccagctgttcggcgccccgaacagcgccaggctggcccagggcaagcgcctctacgaggagaactgcgcggcctgccatgcgagcatcggccgcgacgacctgcaaaccccgatcaaggtccgccaggtgcgcctgaaggcccatggcgacgacgcgccgatcggcaccgacccgtggatggcctgcaacaccttcaccttcagcagccccagcggcaactacttcggcctgttccgaccttccctcggcacccccagcggcgtcggcatcgtcgggcggacttcgaagatcgccgacatgcaggtccccgaggtgttccagatcatgctcggcaagaaaggccagctggccgacggcatcgccgagatcatccacgccatcgtcaccgggcagcagaccctgcccggctccgacagcctgcaagcggtgcccgccggacaattgctgctggccggcgccgcccctgccgacagccaggcgcagagcctcaccgccggcgaagtccccaccgacaaaagtgcgcgcaaggactactgcctgaataccgagcatccattcctcggctacatcgctcgcccgctgaacggcatctgggccaccgcaccctacctgcacaacggttcggtgccgtcgctgtacgacctgctgctgccccaggagcaacggccggccaccttctacaccggcagccacgagttcgatccgagccgtgtcggctacctcaccgcgcccggcccggacaacgccttccttttcgacacccacctggaaggcaactccaacgccggccacgacttcgcccgcgagtacgacgaaagccagcgcctggcgctgctcgaatacctcaagaccctgtgagccggccccgcccacatgcccaatagagagaaccgcccgatgcccctatcgcgactcagccttgccatcctttccgttctcgccggtgccccggcattcgccgacgacagcggcgtcgacctcgaccagggctggaaccagacccagaagaccgcctggctggaagccggccagggctcgcggatgctgccgctggcctggctggtggcgctggagcagcgcgccagcgaagaaccgctgatgtccgatgcgctgatccgccagtacggctatgtcccgcacaccctcggcggttccagcgtgaaggtggtgcagggctacgcggtcgaccgcagcgacgacagcgacctgaccttcaccaagctgcgctggaaagccctgcagggctccagggaaccctgggtcggaccgacctgcagcatgtgccacacttcgcacatcagctaccagggcacccagctgaccgtctacggcgggcagaccatgggcgacctcgccggcttccagctggagatcctcggcgccctgcagagcacccgcgccgacaccgccaagttcgagcgcttcgcccgcaaggtgctcggcgccgatggcctggtcagcggctacaacgacgccaacaaggcacgcctgcaggcagccctggacgccaccatcgtgcgcctgcgcgacggctcgcacttcaacctgccgcacgatcccgagttcggcccgggccgcctggacgccatcggttcgatcttcaactcggtgggctacgaactgcatgccgacgagcagatctatggcgccgaggacgcccccgtgagctatccgttcctgtggaacgtaccgcagctggaccgcgtgcagtggaccggcttcaacccgaaccacatcaacgtggtcgagatcgacaaccgcaagttcgacgtcggcgccctggcgcgcaacgccggcgaggcggtcggggtattcgccgacgtcaaggtgctcagcccgatccagtcggcgctgcacatcggctacccgtcgagcatcaacgtcgacaacctgatccgcatcgaagaccagctcggccaactgaagccgccggcctggccgaaccagctgttcggcgccccggagccgaccagggtcgccgagggccgcgagctgtaccggcaacattgctccagttgccacacgccgctggaccgcaacgacctgcggaccccggtgaagaccgtgctcacccacctgcaggcgcgcggcgaggtcgcgccgatcggcaccgacccgtggaccgcctgcaacagcatcgcccagctgaagaccggctacgtgcgcggcaagccctacctgtccttcgtcggcaccggccagcgcggtttctacggcaagcaggcctatgcggtggacgtgctccaggaagtggtggtccaggccctggccgcgcgcggcctgagcgtcgccctgggtgccttccagaccgccgccctgggcatcttcgacgggcagttgccgccgctgatcagtccggtgccggacagccccgacgccgacagcgtcgaagcgaccgccgcggacgcgccaggcgccctgctcctggccgaaaacgtcgcggccggcagcgacaaggcccggcgcctggagcagtgcctggcgatgaccagcgacctgatggcctacaaggcgcgcccgctgaacggtatctgggccagcccgccctacctgcacaacggctcggtggcgaccctctacgacctgctgctgccgccggacctgaggccacggaccttctataccggcagcgtcgagttcgacccggtcaacgtcggctacatcaccgatgccggcggcgccaaccgcttcctcttcgacagcggcaagccgggcaacgccaatggcggccacgactacggcaacgcgcagttcaacgagcagcagcgccgcgccctggtcgagtacatgaagaccctctgaagcccctcgcgcggccggcgctcccggccgcgtccctcaaccggcggcgacccgccgcgcggtctcgacgaagcattcgaactgggtgtcgctggcacgaagccgcgaagtcggcgacaccgccagccccaccggcaggcggaagccttcgttgaccgccgccggcagagcggtgaaggccacccccggataggcgaacttggtcagcgacaacggcaggaaggcgaagccgtcgccgctggcgacctgggccaggagaatgctcaggtcgttcggccgcacgctgcgccggggcgcgaaggcggcggcatccatcgcatcgttcatgaactggctgtaggcgggaaacagcgagtccttcggtaccagcagcggctcgccaatcaggtcgttcagcgaccagtcgggcgccagtcgccggtgcagggtttccgacagggcgatgacgtgctcgtagctgccgatctccatcagctcgtattcgcgcaccaccttcggcggcgcgccgatgatcgccgcgtccagggacgactcgcggaccaggctgagcaggtccagcgatggcgcccaggatggcgaaacggcgctgcacacccgcgcttccttcagttgccgggccagctcgccggaccagccgggatcgaggtagcggctgaaaccgatgtgcaactggcggtcgtcgccgtcgccgatgtcgcgggtcagcgccttggcctcggcgatgatcttcactgcgcggcaatgcaccaccctgcccacctcggtcaggctcaccccggccggaccgcggacgaacagcgcctcgccgatgtgcacttcgagcgcctggatctgccgcgacagcgacggctgcgaaacgtgcagcacctcggcggcctggccgatgctgccgtactcggcgacacaggcgaaatacatcagctggcgcaacgaaggcatcgccttcgaccagttgatgattgggaaactggcatcggtcacggacattgcgtacatacccctcgctggcaacacgggtcggatcggcacgggcagggaaaccccgggacggcgcgacgaacgaccgccggcagcctgcttccgaaagccgtttcgcggcagaagaacgaaagataggtagcggagatgacaggaagcgcgacgttcggggccgggacgctcttcatgggcggcgtcttgttcccgcgccgccagtatagccaggcggcatggggaactggccatgcggcgcggcacggccgcgggccaccctcgccgttcggataggtccccttgccaggtcggtccgaagctgccgggggctatcgaaagcgctgcgccgtgggcaccggccacgaacgcaggccaccccgtcggcagcggctgaaccgcttcgtcttttcgtgaaccgcttccgtgtcggcggagcgccaggggggctacgctgagtttttcaggatcaggagtaccgccatgctggatcacgacctgactgtcgccctgctctgccgtctcaaccagaaccagagtgccctcggcatggccctggaggagctggcgatctgggcgaagcgccatgaaggcggcgaaacctacgatgtcgtcatgaaccacctgcagaccctggagcgcaacgccgacttcgtcgccgaggccatcgtcgtcctgatggcggatcgctgaagcgcgccggacccgtacgagcggacgagcctgcgcggtgcgctgggcacggcacgcagtaaaatcttcaagatttttcttacaaggcaataggactcgtccaagttacctcgcccatagctcccggtaccctcgcccgttacaccttccaagcaccaacgggatctccagggcttatgcttcttcgaaccatcagtgtggaaactgccgagcagacggaactgaatgcggccttgttgtgtggtttcgccattcccgccagcgaccgcaacttcatcgcctacagcctcaacgaacaggtcgacgaaaacgactcgcgcgtctacatcgcctccctgttcaagaccgacgacggcttccgcctgggccgtctcgacaccgacgaggcctgcgaggcggccatccaggtgttccgccaactggtccgcgaagccaccaccggcaaccgccggaccagcgatctggcctaccacctcatcgacctgcaggacgcggccatcgccccctcgcggcgggaagaacaccgctccctggtgctcgaacgcgaatgggtgatgaagctcgtcaccttcgagtccccccatggctacggccccgccctggatggcgaggaaccctgcgcggaagtcccgccgctcgtccaggaggcccttttcgaagacgccgctcccgatgtcctcgccgaagacgatgcggacgagaccacggacgggccggcggagcccatcgacgagcccgaggcggcggaagacgaaaccgtcaccgaggccggatgcgtcgagcccgagccgcggccggaggcggaaacggcagcgcccgagggtggggcgccagccgagttcgcggcgaaagcggagcagtccgccaaggtagcggatgccgaggccatcggcgccttcgtcgacaacgccagtcatcttcgcgaggagcttgccgacctggcgcagatgctccaccccgcgctgcacgccgccgacgccacgggcagcgccaaccttccgtctccagacgccgccgaggaatcctccatgcccccgagcccctcccccctcgccgcacccgcgccggaaccggtatcggccagggtccccagcctgtcgctgcgcctccgggtgccgcccgcacgcctggccggcgccgagggcggggccaacgccagagaggcgcccacccaggccgccgccgtcattcgccaacccgaggatgaagcccacgtggatacggataccgcgctcgatatcggcaacgataccgagcatctgctacaggacgtgcagggcaccctggccgacctcgccggcatggcccagcaactgagccagcagaagcaggaagcgctcaagcagcaggagtcgctggagtcgctccagacgcaactgcacgagaaggagcggcaattgcaggaaaaggaaaagcagctccggcagtggcacaagcgcctgcaggacgaccgccaggcgctggagcgggaaaccgagcagagcaaccgtctcctcgccgagcgcagcgcggccctgcaacaactcgcggaaagcgtcgaagcccgcgagcgcagcagcgcgcggcgagccgaagtactgcagatcgagcaggaacgcctcgaagagttgcgcagccagcagaacctgcgccaggccgaactggaaaagcgcgaagccagcgtccagcagcgcagcctggaactcggcgagcgcttcaagaagctggaaagcgcccgcgagaagctggcgcagatcgtcaagggtttcaacgagaccgtgcagttcaataccgctctgcacgccatcagtcataccgggttgaagcgccaggaagagagcgcagccgaactggaataaggttctcctccggcaaaagggcgcggcgccgatactggcccgcgccctttttcattcgcccagctgcgtccggccgccggcaaacaccggggtcgctttgccgcgcccagggtatcgcgcgctcaatacagctcgggtcgccggtcgcggtgcacgtggttgtgcgcactgatgcgtttctcgtcggcctcggcaaggtcgagacgggccagcagcatacccgcctcgccctgcagcggcccgtccagcgggtagccgtcggcgtcgacgatcaccgagccgcccacccagtcaaccccgcgttcctgcccgcagcggtcgcaggcggcgatgaacaggcggttgaccgaggcattggcctgcaccctgagcacttccgccggccgctcgccctcgggacgcggcgccgccggccagttcaccggcgcgcagagcagttgcgcgccggacagcgccggcaggcgcacccattcgggaaactccaggtcgtagcagaccatcaccgcgattcgcccgaagcgggtagcgaccaccggcggtggctgctcgccggcctcgaagatgctgctttcctcgttccacaagtgggccttgcgatagatcgcccgcacgccgtcggcgtccaccagcgccgcgctgttcgccactcgctgcgggtcgaggcgttcgcagaagccgccgacgatgaccaggtcgagttcgcctgccagcgctttccacaaccccaggctcggtccgtcgcgggtttccgccagggccagggcttcgccgcgatcggcgaaaacgtagccgctggcggccagctcgggcagcaccacgacgttggcgccgcgccgtgcggcctcgcggatcgcccgctcggccaggcgcaggttgtgctcctgtgcgccgatccgcggagcgatctggcaacaggcgacggtaaccttggccatcaggcgcccccctcttccagcaggcgctcgccgagggtggcgagccgtcgttccgcctccaggtccagggcccggcacatgaaggcatagaccgcgccggccaccagcaggccgaccacgaaggcgacgtcggcgccgcccagcgccacggcgaagggaccgctgtagaagctcagggacatgaacgggaccatcgccagcaacccggccaggtaggcgctcaaccccggtcggccccagtgaccgtagatgccttcgggattgaagatttcgctgatcgcgtagtgaccgttgcgcacgaagtagaagtccaccaggttgaccgcggtccagggcaccaggaagtacagcatcagcaggacgaaggtgttgaagctgcccaggtagctttccgggatcgacagggccacgccgaataccaccagggcgatcacgccgatcccggtgacgcgcaggttgagggtcggggtgaccttgcggaaggcatcgatggcgctgaggctggtgagcatggcgccatagcagttgaccgccatgatccccaccagggccgggacggcgatcagcacggtgaaggtgccgaagccgggatacagccggttgcccacctcgcgcacgctgccgatggcgtccggcgccggcaatgccgaggccaggaatgcgcccagcgacatcagccagagcgccgaaccggcggcgcccaggtaggtccagaagatcaccttgcgggtcggcgtttcgtgcggcaggtagcgggagtagtcggagacgtagaccgcatagctgatctggtagccggcggcggccgacagttggaccaggaacgcgctccaggagaacgccggcgtaccgcccagcgccgcgtccgcttcgaggctgcgcagcgcactgacggtgaggacgccgaacaccgcgatcatcacgtaggtcagccagcgctgcacggtatgcagcaggtcgtggccgacgatggcgagcaacaccgccacgccgatcagcaggacgtaccagggcgcgcggtgtcccggcagcacggtgttgatcgcgtcggtggcgaggatcacgttgaacacgttgaaaccgatatagacgaagaccaccgcggcgaacggcacgatggccccgcgcaggccgaactgggcacgcgactggatcatctgcggcaagcccatgcgcgggccctggttggcatggaaggccatgaagaaggtgccgaagcagacgccgaggacgatcgccaggatcgagtacagcgcccccaggccgagggccggcccggtgaagccggtgaccatggtggtgagtacgaaattgccggtgaaccagaacggcgcctggtgccagaccttgccgtgacgctcgtggcggggaacgtaatcgatcgaacgcacttcgatcttcgggcgtgacgcctcgttgttattgctcatgcggcttcctcgtcattcttgttatcgctcgccggaagcaggcattccggccggcggccctggcacaaggccatgggaaggacggagtgtcggcaagcgaagacgggaagggaatcagtcaggtcaaataatcagttcagcattttctgaaccatacgcagggcgatcgctgaaccgagggccgccgaggcaccgcgtgcgcccttctgacgcccgctcaaggccggcgcgcagcatggccttcggcggaaacctggggcgcctgggtctgccccgcctcgcgctccagcagatcgcgcaggcgctgcgcatccagcggccggctgagcaggaacccttgcagttcgtggcattgctcgtcgcgcaggatgtgcatctgcccttcggtctccacgccctcggcggtgacccgcaggttcagggcgttgccgagattgatgatggcctgcacgatcgaacggtcgcgcccggtcttctccatgctggcgacgaagcgcttgtcgatcttgatgctgtcgaagggataggtgcgcaggtagccgagcgaggaatagccggtaccgaagtcgtccatgttgaggcggacgcccagctccttgagggccgtcatggtccgcagcgcgccatcgacatcgttgagcatgacgttctcggtcacctccagctccagccggcgagcatccaggcgggccaggcgcagggcctcgcgcacctgccagacgatatcgccggtcatgaactgcgccggcgacacgttcaccgagaccatcacctcgcctggccagctggcggcggtggcgcaggcctcgcgcagcacccagttgccgatctgcacgatcaggtcgctttcttccgccaggccgatgaactcgtccgggccgatcagcccgcggcgcggatggttccagcggatcaacgcctccgccgaggcgatcgtctgttcctgcgccaggaaacgcggctggtagtacaactcgaactcgccgttctgcaaggcggcgcgcaactcggtctcgcgcagcttcttctcggcgagatgggagtccatcgcttccaagtagaaacgccaggtattgcgccccgcggccttggcctcgtacatcgccacgtcggcgcaacgcagcaggccccgcggatcgccgccgtgctccggcgccagggccacgccgatgctggcgccgacatggaagctgtgcccttcgtaggcgacctcgcggttgatcacgtcgatcagccggctacagaacttctcgatttccagcttcgacgacacgtgggtactgaccaccacgaactcgtcgccgccgagccgggcaaccatgtcctggtcgcgggtcgaggcgcgcagccgttcggcgatggcgtagagcaccgcatcgccggcgggatggccgtgctggtcgttgatcggcttgaagcggtcgaggtcgagcatcagtaccgctaccggcgacttgccagccttttccgccagcaggcgttcgaggaactggaacagcttgttgcggttcggcaggccggtcagggcatcgtgcagggacagatgctggatcttcgcatgggcttcgacctcgtcggtgatgtcggccgccgtgccgcgatagccgctggcgacgccgttgcggatcgcgctggcgctcagcttgccgacccgcgcctggccctggctgtcgcggaaagcgcagaccaggctggacggcgcaccggcatcgggcagcccttccagccacttgacgatgttcaccgtatcgctatccagcaactcgtccagccgccgcccgatccaggcctccggctggtagccggtgacgtcgcggaagcgcacggagagataggtgaagacgaaatgcccgtcgacttcccagatccagtccgaggccgcctcggctatcgacttgaaacgttcctcgctggccagcagggcctggttgctgcgtttcaggaccttctgctggcgatccaccgcgcgggcgttgagcacggcgctgcggctcagccagaacagcagcccggcggcgagcacgaagattcccagcagcggcaacgcggtctcccgcagcatggcgctacccggacgcgacgacacccaggccaggcgatggggagtgccctccagggcaaggctttccttgtcgcccgccgcgccgccggccagcaggtgcaggttggcgatgccgtagtcgccgccgagcttggccagcttcaccggggtcagccggtcgacgaagaccatcaccgaggccttggccaggtcgatgggcgcatgatcgctggtgggcttgatcgccgaggcgaccaggatcgccggtgcgccgtcgaagtcgacgtagcggctgatcgccgcctcgtccaccgcggcgcggcgggcggcgctgaggatgtctccggcatcggcgcccagcgagtcggccagcgagcgttcggaaagctcgccctcgagcatggcgtagcgagtgccacggtcgtcgatgacgaagacgccgtcgtagccattggtggtgtagagcaccgagccgaggttgttcttggtgaaggcccagtccacgtcgacccggtttcccagatagacgtaggcgtcggtccagaaggaataggtggtggagaactgctcggaatttttccggcgattctgcagcgccttttccacgtagaaatggctctgctcgatggcgatgtcgtcctggtgcctggcgatgtgcaggatcgcccagccgcatgcaccgagggcgaggaaaagggcggccaggaacattaggagatgcttggagacctgggagactgcggtaccgctggcaatcgctgaagcaagcatcgattcgccatccttgtgaccgtataggtgcgggccttggtcactgtcttatagttaagcatccagggggcgtcaaaaaccccgcttggcaagcgcatcggcgccgaagatgcggctgccgctcccgcaaaggcgcgcgccgccgctggcctcggcggcgcgcggcggctctcagcggccctgcctggcgacgatcgcctcggccacgctggccggtacctcggcatagcggacgaactccatcgagtagctcgcgcgcccctgggacatcgagcgcacgtcggtggcatagccgaacatttcgcccagcgggacctcggcacggatcaccttgcccgccggagtatcctccatgccctggatcaggccacgccggcggttgaggtcgcccatcacgtcgcccatgtagtcctccggggtcaccacctcgaccttcatcaccggctccaggagcaccgctccgcccttctgcgagaggtgcttggtggccatcgaggcggcgatcttgaacgccatctcgctggagtcgacgtcatggtaggagccgtcgtacaccgtcgccttcaggccgatcagcgggtagccggcgagcacgccgttctgcatctggtcctcgatgcccttctggatcgccgggatgaattcgcggggaatcaccccgccgaccacctcgttgtggaactccaggccttcctgcccctcgtcggccggagcgaagcggatccagcaatggccgaactggccgcggccgccggactggcggacgaacttgccctcgatctcgcaggtgttgcggatggtctcgcgataggccacctgcggcttgccgatattggcttcgacgccgaactcgcggcgcatgcggtcgacgatgatgtccaggtgcaactcgcccatcccggaaatgatggtttgcgcggtctcctcgtcggtcttcacgcggaacgacgggtcttcctgggccagcttgctcagggcgatgcccatcttctcctggtcggccttggtcttcggttccacagccaccgagatcaccggatcggggaagtccatgcgttcgaggatgatcggcttgtcgatggcgcacagggtgtcgccggtggtcacgtccttcatgccgatcagcgcggcgatgtcgccggcgcgcacctccttgatctcgtcgcgctggttggcgtgcatctgcaccatccgcccgacccgctccttcttgcctttcaccgagttgagcaccgcgtcgccggaagtcagcaccccggaatacacgcgggcgaaggtcagggtgccgacgaaggggtcggtggcgatcttgaacgccagcgccgagaaaggctcgtcgtcgtccgcatggcgctcgtcgtgcttctcttcgtcgtccgggtcggtgcccctgatcgccgggatttccgacggagccgggagatagtcgatcaccgcgtcgagcaccagcggcacgcccttgttcttgaacgaggagccgagcaccgccggtacgatctggttggccagggtccgctggcgcagcccggccttgatctcctcgatgctcagttcctcgccttccagatacttgttcatcagttcgtcgttggcctcggcggcggcctcgaccatgtgcgcccgccactcctcggccagcgcccgcagctccgccgggatctcctcctcgcggtagctggtgccctggtcggcatcgttccagtagatggccttcatcttcaccaggtcgatctgcccgctgaagttttcctccgcgccgatcgccagttggatcggcaccgggacatggcctaggcgttgcttgatctgcgcgaccacgcggaggaaatcggcgccctggcgatccattttgttgacgtaggccaggcgcggcacatggtacttgttggcctggcgccagaccgtctcggactgcggctcgaccccgtcggcgccgctgaacaccaccaccgcgccatcgagcacgcgcagcgagcgctccacctcgatggtgaagtcgacgtggccgggggtgtcgatgatgttgaagcgatagcggtgcgggaactgcttggtcgagccctgccagaaggccgtggtcgccgccgaggtgatggtgatgccgcgctcctgctcctggaccatccagtccatggtcgccgcgccgtcatggacctcgcccatcttgtggttgacgccggtgtagaagaggatccgctcggtcgtcgtggtcttgccggcgtcgacgtgggcgacgatgccgatgttgcgataaagctcgatgggagtggtgcgagccatgatctgccccttgggtgctgccctggatgatgggaacgactgctgaaagaaaaatgtagctgaagaaaggacgccgcagcaccgccgcgacgcctgcttttcgacctcggcagaggggactggttctgccgctccggcccgccgacgaaaggcgcgacggcagggcttgttcccagcggacataaactcatggcgcaaaggtctaagccgtccctggaaaatcccccggctcgacggacatccctggacacaccggaacaagggatgccccgaccatgcaccgatcgctccacaccgacgcgccgctgggcgccgccctgctgctggccctgcagctcgctcccggcagcgccgccgcggcggaggatcaggcgcctgtcgacccgcccacggtccagttgcaacgaatcgaggtgaccggcagcgcgatccgccgggtcgatgcggaaaccgcggtgccgatcagcgtcctgcgcgccgaggagctgcgccaacagggcgtgaccagcaccgaggaactgatcggccggctttccggcaaccagggcgtatacaactccagtcgctcggtcggcagcgccaccggcggcgcctcgttcgccgacctgcgcggaatcggcgcgaacaagaccctggtgctgctcaacggccggcgcctggcgaacaatgccatcgacggctccgcggtggatctcaacaccattcccttcgccgccatcgaccgggtcgaggtgctgcgcgacggcgcctccgcgctgtacggcaccgatgccatcggcggggtgatcaacttcatcacccgcaagagcctgaacgaaggccgcttcgacagcggctacgcctcccccacccacgacggcggcggcaaccagcgcaacgtcagcgctagctggggcttcggcgagctggaggaggatcgcttcaatgtcttcgcggtggccaactacgacaagcaggagcgcctcggcgccaaggaccgcggctacacctacaactaccagccgggacgcggcctcgactacagctccggcaccgccttccccggcaactggagccagggcgccaacgccagcaatccgctggccgccggcggttgcaagggcgccgacctgattccgcgcaacggcatctgccggcagagcctgtggcgctacctcgacctggtgccggaaaccgagaagacctcggtgttcagccgcgccaccggcaagctggccgacgagcacaacgtcagcctggagtacttctggtcgcgcaacgacaacgctacccaggtcggcccagggaccctcaccggcctgcagatcgatcccggcaccgccttctatcccggcaacggcatcactcccggacccggcggcttcgtcctcgacccgagccggccggtggaggtcaactggcggcagagcgtgctcgggccgcgcctgcaatcctcgcagaacaccggccagcgcctgctgctcggcttcgacggccagttcgccggctgggactacgatatcggcgcctcgtacaaccagaacaaggtggtcgaccatatccacagcggctacgtcgatgatcgcgccgccgccctcggcatcgccaacgggacgctgaacccgttcgggccgcagaccgacgccggcctcgcctacctcggcagccacgccctgagcggcgacttccgtacctcggtcggccgcgtcaagggcctggatgcccgcgccagccgggagatcggcgactggttcggcgccgggccggcggccctggcgctgggcggcgagttccgcaaggaagcgttccaccaggacatccaggacttcgccggcaacgtgcagagcctcggcgtcgatcccgccgccacggtcagcggcgagcgcaacctgaaggcgcagtacgccgaactcaacgtgccggtgctggacagcctggaactcagcgcggcgatccgccacgacaagtacagcgacttcggcagcaccagcaacccgaaatattcgttccgcttccagccgttccgccagttggtcctgcgcggcgcctacagcgaaggtttccgtgcgccgtcgctgtacgaactgtacaacccgaccttcaccacctataccagcgccaactacgacgacccgcgcctgtgcgccggcggccagccgagccagggcggcatcgccaaccgcgactgcgcccagcagttctacaacgccaccggcggcaataccgacctgcgaccggaaaccgcgcgcaacgttaccctgggcctggtctaccagccgctgcgcgacctttccgtcggcctggacttctggtggatcaggatcgccaaccagatcgccgagtttcccgaagcggcgatcttcgccgacccgcaggcctacgccggacgcatcgtgcgcaaggccgacggctcgatcgatcacgtcgtcaccggactggccaacctcggcaaggtaaagaccagcggcgtcgacctgagcctcgattatcgtttcccggccagccgctacgggcagttcgggctcgacctgcaaggcacctacgtgtcccgctacgacttccagcagcagatcggcggccagtacctggacaacgtcggcgacttccagggcgtcggcgtgatcgcccgctggaagcacgtcgccaacgccacctggagccgcgacgcctggcaggccaccctgagcaaccgctacaccagcggctacaacgactacgaccgcgccagccacggcaaggtcggctcgtggaacctctgggacctggccggcagctaccgcctcagccacgcgctggggctgaccctcggggtgaagaacctgttcgaccgcgaaccgccgttcagcaaccagacctacaccttccagagcggctacgacccgcgctacaccgatccctacgggcgcatcctgttcggccgcctcagctacagcttctgatgccggcgcgggcgcccggccggtatggccggcaagcccgtcgacggctgtccagctaccagatccggtagccctgccagatttcgcaggcgaccagatctggcaggttgttgggctcccggtgccatgcaacctattacgcctctcgccccccacccgttcgcgcaagaggacaccgcatgatcattctcgggatcaccaacaacgacctggccggcgcctgcctggtgcgcgacggcgggatcgtcgccgccgccagcgaggagcgcttcacccgccagaaggaccacaaggcctggccgagccgctccatcgactatgtgctcggcgaggccggcatcgacctggccgacatcgaccgcatcgcctacggctggaacgccgggttcgacgccgggcggcacctcgacctctatctggaccgggtcctcgaggaagcccgcgagcgtcccgagggcctgccgcacctgcgcaagcggatcgccgacgaaatggccaacgacaaggccaagcgcggcgaattcgatgccttcgtccgcgccaacggcctgcgcggcaaggtcgagtacatcgaccatcacgaatgccatgccctcggcgcgttcgtctgctcgccgttcgacgaggcgctgaccctcacctgcgacggccgcggcgacttccagtcgctcaccgtcacccactaccgcgccgacggcggcgaggcggtcctgcaacgcgagaccagcgtcgacagcctgggctacttctacgggcgcatcacccgcctgctcggcttcaagccgaaccgccacgaaggcaagatcaccggcctggcggcgttcggcgacgcggaaaagctgctgccgctgatgaacgacatgatccgcctggagaacggccgcctgcgcgcccgctgcggcgaactgtacctgccctcctacgacggctacagcgatccgctgctgcaacgctgcgcggcggaacgcccggcggatgtcgccgctgccgcgcaacggcactccgaagacctgctggtggccatcgcccgggagcacgtggcgcgcaccggctgcgccaacctgtgcctggccggcggggtgttcggcaacgtcaagctgaaccagcgcctgcgcgagatccccggggtccgcgatgtctacgtgctgccctgcatgggcgacggcggcctggccctggccgcggcggtggcggtggcctatcgcgagaacggtacgcgcttcccggcgccgagcatggccctcgggccggacgcgcgcagcgccgcgcagaatgccgagctgatcgccagccagtacccgcaactggcctacagccggccggccaacctgatcgagacgctggtcgaagcgctgcgggaaaaccaggtgctgggcatgttcaagggccgcatggagttcggcccgcgcgccttgtgcaaccgcagcatcgtctaccatcccggcgatgccagcgccaacgactggctcaatcagcgcatggaacgcaccgagttcatgccattcgccccggtcaccgcggtagaacacgccgaggcttgctacgttggctggcgtgaagaccaggtggcggccgactacatgaccatgacctacgattgccatgcggatttccgcgcgcgctgcccggcagtggtgcatgtcgacggcaccgcccggccgcagatcatccggccgcaggccgatccgttcatgcacgccctgctgcatgcctggcatgcccgcagcggccagccggcgctgatcaacacctccttcaaccgccacgaggaaccgatcgtctgcgccccgcaggacgccctcggcgcgctggaggacggcatggtcgacctggtggtgctgggcgagtccctgctggtctggcgcaagggcgagaacgccttcgccagggcgcgcttcgagtgaggcgcaaaccgcagcgaaccggcacggcgacgcgggaaccggcatgtacctgatcttttccggctacttcgccgccgaggggctgatctatccgttctggccgacctggctggccagcctgggcttcggcgccagccagatcggcctgttgatcgccgcggcctactggccgcaggtgatcgccggggtggcgctgacctacgtggccgactggcgcatcgaccagttgcgcctggcgaccctgctggcggccctggccggcgcctgcgccctgctgttccagctggccgagggcctgcccctgttcatcgccctgagcgtgctctacggcgcgttctggaccagcgtgctgccgctcaccgaatcctacctgctcaagcgcgacaaggccgccctgcagaactacgggcgggtacgcgcagtcggttcgctggccttcatcctcaccgcgaccctgggcggcctgctgctcggtcggttcggccagcaactggtgcccgccctggtcggcctgacgatgctgctcaccgcgctggcctgcctgttcctccgtcgccgcagcctgcgccgtccggactcgccgctgccgggcgccaggcgccgtcccgacctgcgcgggatcctccggcaacgccccctgctgctggccatcgccgcggcgggaatgatccagctgagccactcgctgtacttcaccaccgcctcgctgggctggcagacgctgggctactcgtcgttctcggtcggcgccttctggggcctggcggtgatcgccgagatcagcttcttcgccgtctccaaccgcatcctggaccgccacccggcgctccaggtgatgctcttctccagcctttgcgcggcgctgcgctggggcctgctggccggcagcgaacacctcgccgcgatcctcctcggccagtgcctgcacgccctcagcttcgccgcctaccacgccgcggtgatgcgttacatccgcgaccacgcgccggaaagcgcgcgggtactgacccaggggatctactactctctggcggtagcgctgcccatgggcctcgccagtccggccgccggctggctgtacgaaggcctgccgcagtggtcctatctgatcatggcgctgttcgccctcggcggcgcggtcctggtctggcttgccctacagagtgcccgagatgcatcgactagcgttttcagccgttctgtttgacatggacggcgtcctgatcagctcccgcgaagccatcgccgcggcctggagccgggtcgccggcgaacagggcgtggcgctcggcccggactgcctgcgcgaccacgtgcacggtcgcccgggcggctacaccctggactatctgttcggccacctgccgatggagcgccggcggatcctcaagcaacgggtcgatgcgctggaggaaggcgccgactgtcccctgctgcccggcgtcgccgcggtgatccgccagctgcgttggctggacgtgcccttggcgctggtcaccagcagttggccggcacgcatcgaccacgtgctgcgccagcacgacctgcaggcggcgttccgcaccctggtcagccgcgacgacgtggtccacggcaagccggctccggatggctatcgcctggccgcggccaggctcggcgtggcaccgtcgcgctgcctggtgttcgaagactccctcagcggcgtgcaggccgcctgtgccgccggcgcgacctgcgtggcgatcggcgaggagagcggcctgctcgccgccggcgcgcgctggtcggtccgggatttccgcgagctacggatcgtccgcgaagacgaccggctgtactgccagcatcggcaccccgccacgaccggcagcgagaggagcgttggcgtcccatgagcccgaccctgcaagatgcccggctgctctgggacttcctcggccagggccgctgccatgtgccctgcgaactgctggtggtatgcggctcctacgacctgcgggtctgcgaccacgcctgcgaactgctcgaacgcggcctcgccgaacgcctgctgttcaccggcaacaccgggcactggacgcgccatctctgggtcgagccggaagccgagctgttcgcccgccatgccagggcacgcggggtaagcgacagcctcatcgtgatcgagccgcgggcgaccaacttcgccgagaacatcgccttcgcccgcgagctgttccccgacctgcgccgcgcgaccttcgtcaccaagcccaactcgatccgccgcgtggcgctgaccctgccggtccgctggccgggtctggagggacacgtggatgcgcccgactacgcatttcccgacggcatctcgaacctggtcggcgtactcggggtgatcgacgagatggtcggcgaccttgaccgcatcatgcgttacccggcgctgggcttccaggtcgcctgcccgatcccggcgcaggtcatggacgcctgggaacgcctggtggcgcgcggtttcgaccgccacctggtgaacccgccgcgctgagctgacagcactgtaatcttccccacagcttgccgacaggcgcgcgccgctagggtgtccgcatcgccgcaccgccctggcggggccgcgacctcccggctgcgcaggctcgcgcagtccgtcctgccacctgcgtggaaaccagcggatgcacagaacttcgcgacgcaccttcgtcaaaggcctcgccgccaccggtctgctcggcggactgggtctctggcgcgccccggcctgggccctggccgggccgggccagcagaacctgctcgccggcgacagtttcgacctgttcatcggcgagaccccggtgaacctcagcggctcgccggccaccgccatgaccatcaacggttcgctgcccggcccgaccctgcgctggcgcgaaggcgacaacgtgaccctgcgggtgcgcaaccgcctcgccgaggacacctcgatccactggcacggcatcatcctgccggccaacatggatggcgtgccgggcctcagcttcgagggcatcgctcccggcggtctctacgaataccgcttcaaggtccggcagaacggcacctactggtaccacagccactcggggctacaggagcaggccggggtctacggcgccctggtgatcgacgcccgcgagccggaaccgttcagctacgaccgcgactacgtggtgctgctcagcgactggtcggacgagaagccgcagcgcatcctcgccaagctgaagaagcagtccgactactacaacttccacaagcgcaccgtcggcgacttcatcgacgacgtcagcgccaacggctgggccgcgaccctggccgaccgcaagatgtgggccgagatgaagatgagtcccaccgatctcgccgacgtcagcggctacacctatacctacctgctcaacggacagccgccggacggcaactggaccggcctgttccgccccggcgaaaagctccgcctacgcttcgtcaacgcctcggcgatgagctatttcgacgtccgcattcccggcctgaagatgaccgtggtggccgccgacggacagcacgtcgagccggtcagcgtcgacgagttgcgcatcgccgtggccgagacctacgacgtgatcgtcgaaccgggcggcgagcgcgcctatacccttttcgcccagtccatggaccgcagcggctacgcccgcggcaccctggcgctggccgaagggcttagcgcgccggtgccgacgcccgatccgcgcccgctgatcggcatggacgacatgggcatgggcggcatggaccacggcgccatggggcatggagcggcgacgaggcccgccagagagatggaccattcgaagatgtcgggcatggacatgaatggcatggaccattcgaagatggccggcatggacatgaacggcatggaccactccaagatggccggcatggaccactccaggatgggcatggacaccatgccgatgcagtcccatccggcttcggaggacggcaacccgctggtcgacatgcagaccatgacgccgacaccgaagctcgccgaccccggcctcggcctgcgcgacaacgggcggcgggtgctgacctacgccgacctgcgcagccgcttcgccgacccggacggccgcgagccggggcgcaccatcgagctgcacctgaccggacacatggagaagttcgcctggtccttcgacggcatcaagttctccgacgccgagccgctgcgcctgacctacggcgagcgcctgcggatcgtcctggtcaacgacaccatgatgacccacccgatccacctgcacggcatgtggagcgacctggaggacgagcaaggcaacttcctggtgcgcaagcacaccatcgacatgccgccgggcacccgccgcagctaccgggtcaccgccgacgccctgggacgctgggcctatcactgccacctgctgttccacatggagatgggcatgttccgcgaagtgcgggtagacgaaggagacaacgcatgagccgccagccgaaacccgcccgcctggccggcggtgccctcgccctgggtctgctgctgggcctgccgaatcccgtcgaggccgcgcaggacaatggcatggaccactcggccatggaccacggcgcgatgcctggcatggaccacggccagaggacctccgccccggcgaaacccatggaccaccaggggatggggcatggccggatgccagggatggaccacggcaccgcatcgcccgccccggcacagcccatggagcaccagggaatggaccatggccggatgccggggatgagccgcgctgcgcggcaacctccggcgcaggccgcgcccagccagagccgtacgccgatcccggtgccgaccgaggccgaccgccgtgccgcctttccgccgctggaggggcacaaggtgcacgacagcgcgctgaacagcttcttcctgctcgaccagttggaataccaggacgccgacgacggcagcgcgctggcctgggacgccagcggctggatcggcggcgacatcaaccgcctgtggctgcgcagcgaaggcgaacggctcgacggcaagaccgaggacgccgaggtccaggcgctgttcgggcacgccatcggtccctggtgggacctggtcgccggcgtgcgccaggatttcaagcccggctcgccgcagacctgggcggcgttcggcgtgcagggcctggcgctctacgacttcgaggcggaagtcaccgccttcctcggcgagaacggccagagcgcgctgcgcctggagggcgagtacgacatcctgttgaccaaccggctgatcctccagcccagcgccgaggtcaacctgtacggcaggaacgatcccgcccgcggcatcggttcgggccttgccgatagcgagctgggcctgcgcctgcgctatgagatccgtcgcgagttcgcgccctacatcggggtgacctggaaccgctcctacggcaacagcgccgacctggcccgcgccgagggcgaggacgacgacgaggcgcgcttcgtcgccggtatccgcatgtggttctgaacgcgatcgcggccagccgctagcggtagccgtcaagcaacggcgaatcgtcgatgaggtcgcagcgttccagcgctggcaggttgcacggccggtagtcggggcattcgtccagccgccgctgcaccgaacggtgcagcttgacccgggtttcctgcccgaccggttccagcggccgcgagcgcggccggccacgcgaccagcgccaggcgcggttgccgctgcggcggtcccagaccagcagcggcagccactcggccaggcgccagggccgggtcatcaccggcaggatcggcgcggtcgggtccgggccctgcttcgaacgtgcgcgcaactggtcgcggctgcgcgccgggtcgacatgcaggccggcctccagcgcctcgccgagcatccaggtaaaggccaccagagccagccgcgagtccttcggcgcatagccaccgccgacatcggagtgcatgccggggaaccacacctgcaacacgtcggacttgcggtccttctcgccgaaccagaggttctgccggaagaagcagcggcattcgtcgatggccagggcctggcggaccacgtcgaccatttcgttgttcgaggaatacggcacggtcagcgggtcgtagacccagcccaccgaggtcacggtgtcgaacaggccgaggaagtgcaccttcacctgccggccgaagaccttgcggaagcgtcccagcagaccgaagtccggcccgcggcgacgcgtgccggcccgcttgtcttcgtcgcggggcggcatgcgggtggtgagcagggtccaggcgtagtcgaagagatgcggctggtgcgcatcgatcaggcccaccgcacgcagcatcgcggccagcacgcgcaccgcgtaggccccgcgggaaaagccgaagaggaatatctggtcgccgggccggtagtgctcggcgaggaagcgataggcgccctcgacgttgcgcttgagcccccagccgaaggccaggccggcgatccgcgagggaaacttctgccactcgaacagggtttccttcaggccgaaggtgccgacgccctggtcgtagtaggccagcaccctgcgcggatcgcgcgacagcgaacggtacaggcgcaccacgttggtcggctggtcgccgaagcggttcgaggttccgtcgatgcagaccaccaactggcgcggcgcgtcgttgtcctgggcactgccggcaggcggcaaggcggaatcgggggaaagatcgtccattgggctcacgcaggcaaagcctgacttccgtcggcggtggatgggaatggcgacgcatgatacccaacctggatgatccgccaagcgcgcattgccgggaaacggcggcaaagacgaaaagcccctggagccgcagggcgaataaccgcttcgcggttatccgccgcccctggcttcggcgagggcgggtcgagccggccgctcagcctgccctggataccccgaggaacggctgccacgccggcgcgccactatccgccgcggccttgagggcggccaccgccgcgtcgacgtcggcctcgcgggtgtagcgaccgaggctcaggcgcacgctgcggccagcgctggcggcatcgtggccgagggcgagaagcacgtgggacggcgccggccgcgccgagttgcaggccgaggtgctggacaccgccaggctggactccagtgcctgggggacaaaggccgggttgtcgaaggtcaggttcagggtatgcgcgatgcgtgcgtcggcgctgccgttcaggcgccagccgtcgatctgcgccagcccctccagcagacgccgctggagtccggcgatgcgcctgccctcctcctcgaaaagctcgccggcgagggcgaaggcctcgcccataccgacgatctggtgggtcgccagggtcccggaacgcaggccctgctcgtgtccgccgccgtggatctgcgccttaagccgccgctcggcgcgcggcccgacgtacaacgcgccgatgcccttgggcccgtaggtcttgtgtgcggagaacgacatcaggtccaccgccaggctgcccaggtcgatcgccaccttgccgctggcctgcgccgcgtcgacgtggaacagcgcgccgcgctcgcgcacccgttcgccgatggcggcgatgtcggtcagggtgccgagttcgttgttgacccgcatcagcgacaccagacgggtatcggcgcgccaggccgcctccacctgttccggccggatcaggccatcggtgccgggcgccagccaggtcacgctccagccgtcatcggcgagttgctgcacggtgtccagcaccgccttgtgctccaggcgactggtgatcaggtggccgggtgcgtccagcgcctgggccacgcccttgagggccaggttgttggattcggtggcgccggaagtccagacgatctgcccggcgctggcgccgaccagcgcggccacctgctccctggcccgctccactgcccgccgcgcctggcggccgtaggcatgggaattcgacgcgggattgccaaaacacgcctggtagccgagacactccaccatggcccggatcacgcgctcgtccacgggcgtggtggcggcgtaatcgaagtacaacggtaacgaactcatcgcattcccccaatcgatcggacggacccggaagccgacatggctccttgtccctgacgggcccgcaggccgatcttaagaaaagcgccggggcgtctggaaagaacctttcggaacatccttagagtcagcatggtttcccgcctcagattcccagcccggccacccgcagatgctcttccaggcgcagcgcgggtatcgctccgagcaactcgcgggtataggggtggcgcggctggctgaacagcgcagcggcgctgccctgctccaccacccggccgtccttgagcaccaggatgtcgtgggccagggcgcgtaccacggccaggtcgtggctgatgaacaggtagctcagcccgtggcgacgctgcaaccgacgcagcagctcgaccacctggcactgcacgctacggtcgagcgccgaggtcggttcgtcgagcaggatcagcgccggcttcagcaccagcgcgcgggcgatggcgatgcgctggcgctggccgccggaaaactcgtggggatagcgttccaggcaaggctcgtcgagaccgacctcgcgcagtgcctccagcacccgcgcgcggcgttcgccggcatcgccgatgccatggatacgcaggccttcgccgacgatctgttccacgctaaggcgcgggttgaggctgccgtaggggtcctggaacaccgcctggaactgccggcgcaatggcaacaggcgcttgccgtgcagccggtcgaggcgctcgccctggaacaggatctgcccttcggccggcaacaggcgcagcagcgcctggccgagggaggacttgcccgaaccgctttcgccgacgatccccagggtgctgccacggcgcagccgcaggctgacctcgtgcaccgcgcgcagtcccgcgcgccggcgcagccagccgccgggcgcggggtagtcgaggctcagcgcgcgcacctccaggcaggtctcgcggcacgccaccggctccgccagcccacccggctcggcctcgatcagcaggcgcgtgtagggatgccggggcgagcggaacagcgtctcgcaggcgttctcctcgacgatctggccatcgcgcatcacgcagacccgatcggcgacccggcgcaccaggttgaggtcgtggctgatcagcaggatcgccatgcccagccgtcgctgcaagctttgcagcagctccaggaggcgtttctgcacggtgacgtcgagagctgtggtcggttcgtcggcgatcagcagttgcggctcgcaagccagcgccatggccagcatcactcgctgtcgctggccgccggagagctggtgcggataggcctcgagcaggcgtcgcggctgctcgaggccggccagttcgagcagttccagtacccgcccgcgcagcgcggcgccacgcaggcggcgatgcaggcgcaggccctcgccgacctggcggccgatgcgctgcaatggattgagcgaggtcatcggctcctggaacaccatgccgatgcgctgcccacgaatcgccagcaatgcctgcggcgacagggcgagcagttcctcgccgtccaggcgcacgctgccgcccaggcgcgccgcgcccggcagcaggcgcagcagggcgtgggcggtctgcgacttgccggagccggactcgccgaccagggccagggtctcgccggcgcgcaggctgaagtcgatccccttcacgacctgcgtgtcgccataggcgacgctcaggttttccactcgcaacagttcccggttcatctcatgtcctcggatcgaaggcgtcgcgcaccgcttcgccgatgaacaccagcaggctgagcaaggtcgccaggaccacgaacacggtcagcccgagccagggcgcctggaggttgtcgcggccctgcccgaccagttcgccaaggctcggcgagccgggcggcaggccgaaaccgaggaagtccagggcggtcagggtggtcaccgcgccacagagcaggaacggcaggaaggtcagggtcgcgaccatggcgttgggcaggatgtgccggaacatcaccccggcgtcgccgaggccgagggttcgcgccgccttgacgtactccaggtgacgaccgcgcaggaactcggcgcgaaccacgtcgaccaggctggtccaggagaacagcagcatgatcgccagcagccagccgaccccgggctgcaccaggctggcgaggatgatcagcaggtaaagcatcggcagacccgaccagacctcgatgaagcgctggccgaacaggtcgatccagccgccgtagtagccctgcaccgcgcctgcgcagattcccagcaacgacgaggccagggtcaggccgagggcgaagagaatcgacaggcgcaggccgtagatcacccgcgcgagcacatcgcggccctggtcgtcggtacccagccagttctccgccgagggcggcgccggcgccgggcgcgcgtagttgatgctgcgcgcgtcgaagcggatcggcggccacagcgcccagccgtcgcgggcgatgcgttcgctcatgaagcggccgcggtagtccggcgggaacggcagctcgccgccgaaggcggtttccggatagtcccgcagcaccggcaggaaccactggccacggtattccagcagcagcgggcggtcgttggcgatcagctcggcgaacaggcaggtgacgaacagcgcgaggaacagcagcagggccaggcgcccgcggcggttggcgcggaacgcggcgaggcggcggcggtgcagcggggaaaggacgatggccatctcactgtctcctcgcggcgaagtcgatgcgcgggtcgaccaggctgtaggccaggtcgccggccagcttcaccagcaacccgagcagggtgaagatgaacaggctgccgaacaccaccgggtagtcgcggccgagcgccgcttcgtagcccatcaggccgaggccgtcgagggagaacagcacctcgatcagcagcgacccggtgaagaacaccgagaccagcgccgccggcagcccggccaccaccagcaacatggcgttgcggaacacatggccgtagagcacccggcgctcgctgagccctttggcgcgagcggtggcgacgtactgcctggatatctcgtcgaggaagctgttcttggtcagcagggtcagggtggcgaaaccgccgaccaccagcgaacccaccggcagcgccaggtgccagaggtaatcggcgaagcgcgccagcgggccgaggcgctcggcgccctcggaagccaggccgcgcagggggaaccagtccaggtagctgccgccggcgaacagcacgatcaggacgatggcgaagaggaagccgggcaccgcatagccgaccaccaccagcgcgctgctccacaggtcgaaggcgctgccgtggcgcaccgccttggccacccccaggggaatcgacaccaggtaggtgatcagtgtcgcccacaagcccagggacagcgagaccggcagcttctcggcgatcaggtcgatgacccgcgcgtcgcggtagaagctctcgccgaaatccagccgggcgtagctcgacagcatcagccagagccgttgcagcggcggcttgtcgaagccgtactggcgctccagggcggccaccagctgcggatcgatgccggtctcgccgtggcgctgcggttccagagcgccatgcccaccctccccgccacgccccagcggaccgccgccgtcgacgccctgcaggcgcgcgatggcctgatccaccggcccgccgggtgcggcctggacgatggcgaagttgatcagcaggatgcccagcagggtcggcaggatcagcgccaggcggcgcaacaggtagccgcccatgtcactgcgcctcccggctcggcgcggcccgctcgcggacttcccaccaggtgttcagccccaggctgtagcgcggcgcctgcggcggtcggccgaagcgattccaactggcgatccagacctcgtcggaataccaggtcgggatcaggtagtagccccattgcagcacccggtcgagggcgcgcacggcggtttccagggcggcccgcgagtcggcctcgaccaccgcctggaccagccggtcgatggccgggtccttcaggccgatgcggttgtagccgccgggatcggcgtagctggaggaatgccagaagctgtactgctcgttgcccggcgaattggactgggagaagctcgaaacgatcatgtcgtagtcccgcgcacgtatgcgctcgatgtattgcgaagcgtccacctggcgcaggcgcatatcgatgccgatccgcgccaggttgcgctggaacggcagcagcgcgcgctccaggcccttgccctggagcaggaggtcgaagcgcagcggccgtccggcggtgtccagcaggcgcccgtcgacggcatgccagccggcctcgccgagcaggcggtaggcctgcaccaggcgctcgtggatatcgccgctgccgtcgttcaccggcggagcgtaggcctggccgaagacctcctcggggatttgcccgcgcagcggctccagcaaggccagttcgtcggcgccgggcaggccgcgggcggccatctccgagttgtcgaaatagctgcgcaggcgcttgtagcgaccgccgaagagctgtcggttggtccattcgaagtcgaacaacaggctcagcgcctggcgtacccggcggtcctcgaacagcggccggcgcaggttgaacaccaggccctggaggctggccgggtacgggtagggaaagctctcctggcgcaaccggccatcgcgcagggccggcgagtcgtagccgctgctccaggccttgacgctggtctcgacattgatgtcggcctgcccggccttgaacgcctgcaaggccacgccgctgtcgcggtagtagtcgaaacggatccgctcgaagttgtacaggccacgcccgaccggcaggtcgcgagcccaccagtcggggttgcgccggtagctcaccgaacgccccgcctcggccttctccagccggtaaggtccgctgcccagcggcggctgcatgctgctgcggttgaagtcgcgtccctgccaccaatgcctgggcagcacgtagagctgggccagcaccagcggcagctcgcggttgccggcatgacggaaatcgaagcggatgcgcaggcgatcctccaccaccggctcgcggacctccttgtagtaggcgcgccagaacgggctgccctgctcgaccaggctatcgaaggaaaacttcacgtcctcggcggtgaccgccacgccgtcgctgaagcgcgcccgcggatcgatatggaaacgcacccagctgttgtccggggctttctcgatgtagcgcgccaggtagccgtattcggtgaacggctcgtccagtgactggaagccgagggtttcgtagatcagcgcggcctgggtcatgctgatcggcgtgccgcggttggcgaaggggttcagcgtgtcgaagctgccgctttccatccgccgcaggctgccgcccttgggcgcctgcgggtcgacgaagtcgaagtgctggaaacccggcggatatttcgccggctcgtcgtagagcgtgatggcatggcgcggctcgctgcgggccaggctggcgagcaggcagcaggcgaagaccaggatgcgtccgggcatggctcaaccaccgaagtgatagctgaagtccagccaccattggcggcccatggcgtcgtagttgccggtgggatagtacggccagccatcggagtcgtcctccttgatctggtcgagcaggttgttcaccgtcaggccgacgctggcgcgttcgttgagccggtagcgggcgctggcgttgaacaccgtccacgggctcaggcgcccgctgccagcggcgttggtaacgctgccgtagcgcaccgcgaagagcgtcgaggtgaactgtgcgtagtcccaggtcaggctggcgttgagtttgctgcgccagtcgtgggagtcgaggctgtcgcgctggttctcgctggggtagtcgtcggactgcttgtagtcgtgggacaacaccagggtgtagccgagggtcgaggagaaggcgccgtagtcgccggcgccccagcggatgttgctgcgcaggtcgatgccgctggtgcgctccttggccgcgttgatggcattgacgtagaccttgttcaggcgattcgggtcgacgctggcgtcgccggcgttgcgctcgacccgcgccagggtgtcgcggcactgcgccgagtccggatcgagcccgccgctgcggcaggccgcctcgtcgcgcagcagtttgtccggatcgagggtggtcagcaggtcatcgatctggatgtggtagtagtcggcggaaaagtcgaacctgctcgacggcgaccagacgaagccgtagctccagtagcgcccgcgctcggacttcaggtcgggcgtgccgctctgcacgtagtcgacccggccgttcttgcaggcgccgtcgacgcctttctcgcaaccgtagtagtccttctgcgccgggtagtagccgttggcgtcggcctggtagatgtagttcaggtccggcgcgcggaagctggtgccgtagctgccgcgtagcagcaggctggtcagcgggcgccactccagccccaggttgtaggtggtctgctcctcggtgcgaccgctgaacctgtactggtcccagcggccggcggcggacgccagcagcgtgtcgtgcagcgggatgctgaattcgccgccggcggcgtaacggtcgcgcgagccgccggagctgctggccttggagacgttgtagagagagccgtcgttgtattgcgagtcgggacggatcctgtagccctgcttgcccacctccagcacgccggcgaaggccaccgggccggccggcaggtcgaacagctcgccgttgccggtgaagctgtaggtctgcgagtaggactcgctgtgctgggtcacgttgcgccgcaggctgcgccactcttcctcgctcagcggacgtccgaggcgcgccggatcgggatcgtagaccgggtagccgtcgcgttcgccgagcttgcggcccaggtacaggtcgaggatcccggccgccggggtgtagcgggtagtgcggtcgctgcggtactcggagcgggtcgcggccagttcgtattcccaggaagtattggcgacgcggtcgctgtagccgagggtgccggtccaggacacctcgcgccacttgctgttgttgctgctcttgccgccgatctcctcgggcgagaacagccggtaccagcgctccaggtcgccgctggaggcattgatgaagtccggcgaggtgaaggacggcccgcgggtattgttctgcaggtggtcgaagccgaacagcaggtcggcgaacagcttgccgctgtcgctcaggtgccaggtgccgccggcgtagccgtcgtagttttccttcttggtctgtagggtccagtagttgttgtagtactggtcggtcatgcagcgatagccacccctggcgcccggcaccggcgccacgttgccgccgaacaggccgccgaggccggcgcaggaggcgtcgccgaggtagcgtccgctctgcgggttcagccggtagccgacgttgttgccgtccgggtagctgtccatgaaaccgcgctggttggcccagaccggctggcgctgctcgacctgcaggccgaacaggccttcgaagtcgcccgtcgcgccgccgccgaccagttgcaggcgctggttgtcgccgccgccgcgctcggtggtgccggcgcgcaggttgacgtcgacgccatcgaatttcttcttcaggacgatattgaccaccccggcgatggcatccgagccgtagatcgccgaggcgccgccgctgaggatctcgatgcggtcgatcatgaccgccgggatgttcgccaggttggtgaagttcaccgagccgccataggcggtcgggtagtcggcgacgcgccggccgttgatcagcaccagcgtgtggttggggccgagatcgcgcaggttgagggcgttggccgccggttgccaggtgttgccgtagtcctcgccctgggtcatgccggtgttctgggtctgcgtctgcaaggcctcgaagacgttgcggtagccacggttctggatttcctcgctgctgatcaccgtgaccggcgacggcccttcctgctgggcgcggggaatccgcgagccggtcaccaccacccgctccagggtctgctccgctttcgccgccagcggctgcaccttcgccgccggtacggccgcgcgcagcggcgcggcggaaatcaccgcgccgcgctcggaacggcggaactgcaggccgctaccgcgcagggcctgttccagggcctggtcgacactcagcggaccgcgcaccgccggcgcctgccggccgcgcaccagcgactgctcgaaggagatcagcaagccgctctgccgcgagatgcctagcagcacctggtccagcgggccggcggcgacgtcgaaggtgagcgccttggcggcgggcgcgggcgtctccgcacgtgcctccggcggcgcggcgtaggccgccgcgagcagcgcggccagggccaggctggaaggcaggcgtgtggatggagcatggtgcggcatcgttcggttccccccgaaaacatggtttccaggggatgagcgatgagcgcgggagatttgcagggcaggcttggaacgctttgttctgagcttataagcgcgggcgaataggcatagcggcggataacgcctccggcgttattcgccctacccaaaaagcttcccccagctccgctaccggccttgccccgtgtagggcgaatagccgcttgcggctatccgccggtccgaacacggcgttatccgccctgccgccctcgggtcagtacgtcagcgccccgcaccagtgcgcgctcttcagttcctcgtagagcgcgccgatcttcagcgagcactgccgcgacggcgggtagatcagcgacaccgggcacagcggcggttcgaacggctggaggatgcgtaccagtcgacgccggcggatcgcctcctcggccatgaagcccatcacctggacgatgccctggccgaccagcgccgcgtcgaccagcgcgtcggccacgtccagcaccaggtcgccgcgcaccgccaggctcagcggctggccgtcgcgctggaactgccattccagcagcttgccggtatgcaggtcgcgcaccgtcgggcagttgtgcccggcgagttgctccaggcgctccggcgtgccgtggctacgcaggtattccggcgacgccaccgtgacccagcgcaacgccgccaatggccgggcgatcaggcgcacgtcgccgacccgaccgagacgcacggcggcgtcgaagccttcctcggtgaggtcgaccaggcgatcggtcatcgccgcctcgatctgcaattgcgggtagcgccgcgtcagttcgcgcagcaccggcatgatcacgatccgcccgagcgcctgcggggtggtgatcttcagcggaccgctcggcgcgcactggcggtccaccagcaacttctcgacttcctccagttccgccagcaagggtgcgcagcgctcgtagaacagctggccgtccggggtcaggctgacgctgcgggtggtgcggtgcagcagacgcacgccgagttcggcttccagccggccgatggcgcgcgacaggccggactgggtcagaccgagggaaacggcggcctgggtgaagctacgggtctcggccacgcgggcgagcaacttgacggcattcaggtccatggcgatctcatcgatgattattttcatcagtgaaaggacggagaggctatttatcacgattccagcatgagaaacactggccgcgcccaacccagaccaggagtcccaccgtgacggaccgtgccgtcccttccaactggatgctcgccctgctcgcctgcgcgcaactgatcatcgccctcgacgccaccatcgtgttcgtcgctctgccggaaatcagccgggcgctggatttttcggcgcaacgcctgcaatgggtggtgagcgcctatacggtggccttcggcggcttcctcctgctcggcgggcgcgccaccgacctgctcggccggcgccgcatgtacgtcctcgggcaaagcctgtacgccctcgcctccctcgcgggcggcctggcccagagcgagttgccgttgatccttgcccgcgccgtgcagggcctgggtggcgcgctgctgttcccggcgaccctggcgctgatcggcaatcacttcgccgagggcccggcgcgcaatcgtgccctggcgatctggagcatcgcctcggcgttcggcctggccctcggctcggcgctcggcggcgcgctcaccgagctgttcggctgggcctcgatcttcctggtcaacgtgccgctggccggcgccgcggcgctgctcgccctgcgcctgatcccggccgacgcccggcgccagcgcggtcggcgcttcgacctggccggcgcgctgacggtcaccgccggcgccaccctgctggtcttcgccctggtccagggccccgagtcgggctgggatgcgccctcggtacgtttcggactttacctttccgtcccgctgctactggcgttcctcgccatcgaacactacagccgcgacccgctgatgtcgctgcgcctgctgggcaaccgcaacctgcaggtggcgatgctgctgaccgcgatcttcatgagcagctacggcgtgcagtactacttcctggccatctacttccagtcggtgtacggctacagcgtgttgcagaccggcctggcgttcctcccggcgactctgctctgcaccctcggtatccgcgtcgccgagcgcctgctggcccgccacggggcacgcgcgacgctggtcgccggcctgctgctgggcgcactcgggctcggcctgctggcagcgtgcctgccgctggggcgcggcttcctggcgctgctgccggccatcgtgatcctcagcgtcggccagggcatgacctggaccgccatgtgggtgagcgccgccagcggcgtcgatcccgccgaacagggcgtcgcctcggggatggcctcgatgacccagcagatcggcggcgcgctcggcctggccctgctggtggcgctggccaacgcccaggtacgcggcgccgatgccgccagcctgctggccagccaggcgcgcggcatcgaatgggtgaccgcgctcagcgccctgctcgccctgtgcggcgccgccctggccctgcgcctgcgccgcgaggagcccgcggcgttgcagccgagtcgcggctgatcccgctcaggcgtcgcccagctcggcgccgagctccagcgccagggcctggaaggccaggcgcgcggcaccggggtggctgccctggcgccagaacagcgctacctggcgggtcggcagcgccggccgcagcgccacgcagcgcaacccggcctgctggcgcgccaccgcctccggcaggatgcttgccagtcttccgcggcgaaccacgtcgacgatggcgctgatcgagttcgcctccagcgcaacccgcgccgtcaccccttgctggcgcaggtaagcgtcgatatgccgacgcgtggcgaagtcgtcgcgcaacaacgccaacggcaactccgccagcgctgcggcggccagcggcgcgtccgccgccgggtgttccgcccccagcaccaggcccaggcgctccaggtagagcggctggctgtcgatctccaccgaacccggctcgctgaaggccacgccaaggtccaggcgatcgtcgatcagcgccgcctccagggcgtcctggggcaactcctcgaggctcaactcgatgcccggatagcgctgattgaacggatccaccagggcgcccaccagatagcaggtgaaggtcggcgtcatgcccaggcgcaggcggccgcgactgaggtcgcgcacctcgtggatcgctcgttgcgccgcttccagctcgcgcaaggcacgccgcgcatgaagcaggtacagctcgccggcatcggtgggacgcacgctcctgccggagcggtcgagcaattgcacgcgcagttgctcttccagttgccgcacctgctgcgagagggtcggctgcgaaacgtgcagcgcctcggcggcgcgggtgaagttgcgatgctcggcgacagcgagcaggtagcgcaggtggcgaagcagcatggaaacatccaactatagaccagaccaatgactggaataataaaccggtcttggaccctatggctcaatccgcgcatcctggctccaccattcgacggccaggagcccagcgccatgcgtgacatcatcgacggctttctccgcttccagcgcgacgcctacccggcgcgctcgcaactgttcaagtccctggccacccggcaagcccccaaggcactgttcatcgcctgctcggacagtcgggtggtccccgaactgctgacccagcgcgagcccggcgaactcttcgtgatccgtaatgccggcaacatcgtccccggctacgggccgcagcccggcggggtcagcgcctcggtggaatacgcggtggcggtgctcggggtcggcgacatcgtggtctgcggccactcggactgcggcgcgatgggcgccatcgcttcctgcgcctgtctcgaccacctgccggcggtggccggctggttgcaccacgccgaggccgcacgggcgatgaacagcgcccacgaacacgcctccgaggcggcgcggctggacgccctggtgcggcacaacgtgatcgcccaactggccaacctgcgcacccacccctgcgtcgcccgcgccctggagcagggtcggctgaacctgcacggctgggtctacgacatcgaaagcggccgcatcgacgccctcgacggcgccagccggcgcttcgtctccctcgccgagcatcccgaagtgcgcgcggtaggcggcgaacccgggcaggcggtcgcctgaatcccttccctcacaaccacccgcaaggagagtcatctcatgcaacacagccaagtgtcccccaacgtgcgccagcaactggccgagaccgtggtcctgaacaaggcccgcctgggcctgtcctggcaggacctggccgacggcaccggtctcgccctgaccttcgtcaccgccgccctgctcggccagcatgccctgccagaggcggcggcgcgcaaggtcgccgcccaactcggcctggacgacgacgcggtgctcctgctgcaaagcatcccgctgcgcggcagcattcccggcggcattcccagcgacccgaccatctatcgcttctacgagatgctgcaagtctacggcagcaccctgaaggcgctggtccacgaacagttcggcgacggcatcatcagcgcgatcaacttcaagctggacatcaagaaggtcgaggacccggaaggcggctcgcgggcggtgatcaccctcgacggcaagtacctgccgaccaagccgttctgaagcgtcgcgccgcccggctcgccgccgggcgcgcgcttcagcggctggcgatgctgacccagtagggcccgtggtagtcgagccggatcggtaggctctgctccagcaatgccagcgccgcgccgctgtcgtccagcgggtagatgccactgacgcgcagcgccgccgcgtcgtcggcgacgctgatgatgccgcggcgataggcgcgcaacgcttccagcacctcccccagcgggcggtcgcggacctccagccggccatccagccaggcgctctcgccgccttcggcaggacctcgggcgagaatcgccgaggcgtcgaaacgggcgctctggccgcgctccaacaggcattgccgtccgtcggcagtggtgatccgcacccgcgactcgagcaccaccactcgcgagctggcgccgtcatcgctgacctggaagcgggttccctgcgcctcgacctggccacgcccggtgtcgacgacgaaaggccgcgccggatcccgtgccacgtcaaccagcaggcggccctcgcgtaagcgcaggcgacgccggtagccatcgaattcggggcgtacccggctgcgcgcgtccagcaccagttggctgccatcctccaggcggaagctctggcgttgtccggtgccggtatacaggtcgccgggccaggggaagccgacgatgccgatccgccccagcgccagcgtcgccacgccgaacgccgccagggcgaggctgcgctggagaaaccggcgacgggcggacggcgcctcgagggctccgatcaattgctcggcgcgcaagccgtgcaggggctcgtcgcgaaacgactgcaagcccaggctgagccggtcgaacaccgcaccgtgctcggcatcggcctggcgccactgctggaacgccaggcgctcctcggcgccggcatggccggattgcagcagcgccatccactgcgccgcttcgtcgaggatgcgttctcgccttccctggctcattcggcaagcacctggtagcactgcttgaagccctcgaccatgtactggtggatgcggctgacggaaacctccagcaagccggcgatctccacgtaggtcagtccgccgatctggctatggatgaaggcggcgcgggccttcggcgacagcccggcgagcatgcgctccaggcgcagcagggtttccaccacctgggcctgctcctcggcggacggcgcgagggcctccggaagcccggccaggctttccaggtaggcgcgttccaggtcctggcgccgccagccgtcgtacatcagccggcgggcgatggtggtgagcagcgcgcgcggctcgcggatgcttgccgggtccggcagggcaaggaccttgaggaaggtttccgaggcgatgtcctcggcgctgtgggggcagccgaggtagcgccgcaggcgcccgctcagccaggaatagtcgttctggaacatcaggccgacgaggcgattgcgtgtctgatccatgcccattccgcactctcgtgctacgggcctgcgccaccgggcgtcggggtggcaggcgaaaccttgatcggcgggaggcggcgccgacgtcggattgcacgtgtccctcccgcaaacagcgatggcaggccgccgggcctgcgcggaaggcaatatgccgcagaagctcgaacgcaaaaaagaatattaattaaggtgtacttaactttttggcattagaagatcgccatcccgcgacgactgtcgtcattccttacgaaatggcaacgccgcgatccgccgaaagcggcatactcgtcagcttgtttcgccgcgtcgacaacgcccgtaccaatgtccgcctcgctccccaacgacaccccgcctgacgaagccctgcccctggtcctggccggtcccctgctgcgccgcgcagagcccggacgcctggtgttctggctggccacgtcatgcccgacgaccatcgaactgatcctcgccagcgaaggcgaggcggagcgtcgggtccgcctcgcggaaggaacccactcggccatccgcatcggcacccatgcctggctgcacctgctggatgtcgcgctcgacccgccgttgccctgcgcccgcctggtcgactacgacctgcgcctcgccgccgacggccgggagcctgcgggaatcgccgaatgggcaccgcatctgctctaccccggtcgccagcgcgccagcctggtgctcaagccacgtctcgaccagttgctccacggctcctgccgcaagccgcatcacccagcggccgatggcctgctgcaggtcgaccggctgctggaggaaaacctgctgcaggccgaaagccgcccggcgttgctgatgatgagcggcgaccaggtctacgccgacgacgtcgccgggccgatgctggtggccatccatgggttgatccaccgcctcggcctgtacggcgaacacctggaaggcgcactggtgaacgacagcgaggcactctacgcgcacccggccacctactaccggcgcgaggacctgctgcccgccttcgagtccaacgaagccctgcgcgagcgcttcttcggcggggtgaagaagccgatcttcacctcggccaacgcccacaaccatctggtcggcctggccgaggtgctggcgatgtacctgctggtctggtcgccggcgccctggcgcctggtcaggctggaaccgccgccggggctggatgcgcggcacgcgcagcgcttcgccggcgagcgccggcacatcgaagccttccgcgatggcctgccccgcgtggcgcgggcgctggcgcatatctcgtcgctgatgatcttcgacgaccacgacatcaccgacgactggaacctttcagcacgctgggagctgaccgcctacggccatcctttctcccggcggatcatcggcaacgccctgctcgcctacctgctctgccagggctggggcaacgacccgcagcattgcggcgaatggctggcgccggtcgcggccctgatggagggtgccgcggcagacggccggctgccctgcgccgagcaggaccgcctgctcgatgccctgctcgacttccagcactggcactaccggttgcctggcagcccgaccctgatcgtcctcgacacgcgcacccgccgctggcgtagcgagcgcaacctgggccggccctccgggctgatggactgggaggcactgagtgaattccagcaggacctgctcggcgaaaaggcggcgatcatcgtgtcgccggcgccgatgttcggggtcaagctgatcgagggcgtacagaagctcttcagttggatcggccagccgctgctggtcgatgcggaaaactggatggcccatcgcggcgcggcctcggtgatgatgaacatcttccgccactcgcgtacgccgggtaactacctgatcctttccggcgacgtgcattactccttcgtctacgacatccggattcgccatcgcgagcgcgggccccggctctggcagatcaccagcagcgggatcaagaacgaattcccgcgacgcctgctggactggttcgaccgcctcaatcgctggctctatgcgccctggtcgccgctgaactggctgacccagcggcgcagtctggaaatccgcccgcgcgttccgcagcacagccaggccggcgagcgcctgtggaacagcgccgggatcggccaggtattcattggcgaggacggccgtccgcgcgcggtgttgcaggtcaatgccgatggctcgccggcgaccgccttcgagcgacatcgcgacatcgaagacgaacgagcggaccagtcgccggtcacgccgggtcgctgagaggccagaacaagggggacgggcggacgccgcgccgcatcatccgcccgcccggtttcagaacggccgctcctgcacgtccagggtcgccgccagcgcttgccagagcacctcggcgaagacccgctgggcgtcgccggccaggtacgcctgcatggccgcgtcatcgctccactcgctgtgcaacaaccacaggtcggagtccccgtccgcctggcgcagttcgtagcgcaggcaaccgggcgcggcctggcccgcctgcgccagctcttgcaggcgcaggccgaggcggtgcgactggccgctgcgggcgcgaatgctgaccaggtgactggcccgattgaacgctggcatgctctctgcctcctcgacatggattcgccgctgcgcaagcggcaccaggagtggaagggccggcggcgccaagacgccggccggccgctgtggggtgtaagggtgacgcatgtgccctgcctccgattaccagttgccgggatgggtccgccgcgccagcgtgccgcccgcggcggggccggaaggcgaacgggaaggcgcctcggggaccagcgcgccgtcgcgcaccggccgcgaacggaaggcacccggcgcgcgctccggcgacatgccgcccgatgacagtctggcctgttgatttgacataggtgtgtccccctgcatgtgtttcccatcggcatgacggagattccgccatgccagccagattagggggatggcgcggggaatcggtagacggatactgtcgggttcttgcctgaaactgccgcgttccggttttttctcatccgcttgcgcccggtgaaacgagctggcttgcctgttcctggcgaatgcttgcctgatcctgccaacgcgcatcgcgatgagtgcctgcagccgcggcgcgcgctagtcttgggaaggtttcccccgcgagtccccgcatgagcgaaaacaccccgcttctttccgtcgatctccccgccgaactgcgccagcgccagagcgaactggcgcagttgctgctcaagcactgtcccagcgacggtgtctacggcaccgccgtcgaccccctcgccctgattcgcgccgacggccccaccctgccggcgcgcggcatgcacaaacctgccctgtgcatcatcgcccagggccgcaaggaggtgcagttggccgaggaacgctatatctacgatccgctgcactacctggtggtctcggtcaccctgccgctggccggccaggtgatcgacgcctcgccggacgcgccctacctctgcgtccggctggatatcgaccctgcggaaatcacccagctgatctccgacgccgggcccatggaagtggccagccggcgcggcgaccgtggcctctacgtcgaccgtatcgacgccagcctgctggatgcggtgctgcgcctgatccatctgctggacagcccgcgcgacatcccgatgctggcgccgctgatcctccgcgagattttctaccggctgctgcgcagcggccagggccagcgcctgcacgagatcgccatcgccgacagccaggcccaccgcatcacccgcgccatcgactggatcaaccagaactacggcaagccgctgcgcatcgagcaactggcccaggtggtcaacctcagcccctcgaccctgcaccaccgcttcaaggccgtgaccgcgatgagcccgttgcagtaccagaagcagctgcgcttgcaggaagcgcgccgactgatcttcagcgagggcctggaagtggccgccgccggctaccgggtcggctacgaaagcccatcgcagttcagtcgcgagtacagccggctgttcggcgccccgccgctgcgcgacctggcgcgggcgcgcaacaccgcctaggggaacgcggcagcggccgcgacggtcaatcgggaagcggcggcataccttcgtcgccccgaccgaccttgcgcaaccgtacccgccatgacccgagccctgcccctgctcctgcttgccctgtcccttcccgccgcggcgacggacagcgagtcgttcgcccgccgctacctggcctatgtccatgccgtcggccagcacagcgaacgactctggcccggctggcggatggccgacaaggccttcctctacagcgatggccgcagtacctgggtcgccgatgccgaaggccgcgcgcagcgcaccacggcggcgggcgacagcgacccggatctcgacctgagctatgcctttccgcgttaccggggccgtccggcggtgctgctgcagatcagcgccgcgcacctgcggagcaataccggcaatagcgagacgctggccgccatcggcccgcacgaagccttccatcgctacgcccaggaagactggccgggcctgcgcaagcccggtggctatcgcggcgacctggccacgctcgacccgcgcccgcgggaataccgctatgccctgttccagtcgctgctccaggccctgcgcacgcccgggcagcgcgacagctacctgagcgacgcccagggctggctgcgccgctggcgcgaagcggctcccgaggaaagccggctggcggcgcaggtcgatctcagcgaaggcaccgcgcgctacatcgagatggccgccgccgcgcgctaccgcaccgatttcgccgaggatccgcaacgctatcggcaggcgctgcgggagtacgccctggccttctacgatgccaacgagatcggcgtcggcgtcgacagcgaagcctacgagatcggcgcgctggccggagtgctgctggacctgcgcgacgacgacgcggactggaaggaagccgcgacggccggcacctggccgctggactacctgctgcgcgaccagcctccggcctggagcgaacttcccgacgacgcgcgggcgcgcggcgagcgctaccggcgcgagatgggcgccacccgccagcgcctggtcgagttgcaggaggccttcgccgacccacggcgaccgctgctggtgatcccgcaaccgcgacgcaccatcggcttcgccacggcggccagcgaggtgcgcgggggcttctacgtccttgccgacgggccgttccgccaggcctacctcggcgcgcgctggaatgtcggcgagctgaccctggacggcgtcgactatctggagggcgacgccgaggcgtactgcccgggctacggccgttcggcgctgattccgttgcgcggaggcgattggcgcgaaggcacgctggcgccggaagaacccggcctgcgcggccgcctggcgactgctcgcagcctcgtcgacgggcggaccctttattgcgcggcggagaatgctccttgaggaccgacaacggcgctacaatgcccgctcgccgccgcaaccccgccgagggctcgccatgaagttcctgctgatcgggctgatccgcttctaccagtacgcaatcagcccgctgatcggtccccgctgccgcttctaccccagttgctcgcactacaccctggaagccatccgcgtgcatggcgcactgcgaggcggctacctcggcgcgcgccggctgctgcgctgccacccctggcacccgggcggctacgacccggttccggagcgccaggaacaggcgtgcgcctgccacagaacggcaaagcccggcaaatgaagccggcgaaaagatcgcaacggcgacatcccgcacataaccggacccgccggtcgacatgcggaattgataaaacctatcattcagggtccatctccccggctatcgcccggcgtccccatgcgccaggcgacgcctgggagctccgctcaaacgtttcatcctgaggcaccgatgccccgtcatcccttctccccttccttcctcgccgccagcgtcttctgcgccgccaccccggccctcgccgcgctgcaaccgatcgccgaggcgccgctggccggcgaaaccgagttccgctgccagttcaacgccgacaacagcaccgattgcgtgagcacctacagcttcaccatcctcaagccgagcggccgcgagatgctctcgcgcatcgatcgcagctacgcggagaccgacagcctgatcgtggagaaggccgagctgacccagcccggcggcaagccggtgccgctggaccagtcgcagatcgatacgcgcaccgcgccgaacccggaccagggcttcctgcgcgaacgtcagacctccctggcgttccccaacctgcgcgtcggcacccgcatcagctacaccctgcgcgagcacttcaccgccaagccgctgagcacccagttccactacattctcagccgcccaccgatgccggtgcgcgacgaccgcttcgtcgccgagttcaaggccgagcggccgatcttcgtgcgcagcgagctgatggacgcctatcgcatcgaacagagcgccgacaagaagaccctcaaggtcagcctgaaaaagccgcaatacaccaactacatcaacgaagccggcaacgcctacctgcgccataccccgcgcctggagctgggcagttcgctggacctgcaggacaacttcggcccgttcgccgcgcgctacaacgagatcctcgccgcggagctgcccaagggcgccgcggcggccgtcgccgcggtgaagggcaagccggcccgcgagcaggtcgccggcctgatgcagtacatcaacgacacctaccgctacctgggcgactggcgcgccagcgagcgcggctacgtgcccttctccctggcggagatcgagcgcaatggctacggcgactgcaaggacctggcgatcctcctcgccgccatgctcaaggccgccgggatcaaggccgaaccgaccctggtcagccgcggcgacgtggtctgggacctgctggtgcccggcatgtacgcgccgaaccatgccatcgtccgcgccgaggtggacggcaagacctggtggctggacccgaccaacccggtgttcgctcccggccgcatcatgcccgacatccagcagcgctgggcgctggtgctgggcgccgacggcaaggtgcggcgcgacgagattccgctggaagcgcccggcgacaccctgcgcgtgacccgcagcgagcattacacccatgacggcgaagcccgggtcgagtcgcgcgtggagctttccaacgcgccgctgatgcagctcagcgtcgccgatcgccagcgcggccgcaccagcaccgaccaggacctgtgccgcaacttcgccaaggaaggcagcgactgcgtgctggagcgcgacgacagccagttcgtgctgccgcccagctatacgatcagtgccagacttaccgaccgccgcgccctcgaccggctcggcggagagtatttctacaaccgccaggacctggccagccagtgggatgccttcgccaagtaccgtagcgaaggccagttggccgagctgtacctgggcgaaccgcagatcacgtcctacgacatcagcctgtccggcggcaagactgacgagccggcgcacagttgcgagatccgcagtccctggttcgacatcgacctgcaggccgaaccggccaaggatggcggctaccactatcgttatcgggaagtgcagaagaccagttggctcaaccacgacgagatcaacagcgccgagttcggcaagctgatcgagcagagccgcggttgcgtcgagcaactgcgcctggtggtcaagctggacaagcgtccctgagcgacccgcgcccgctccggcgggcgcgtccagccgcaccagcgggcgatccttctactcgcccgcgcagccctccaggccgagcgcctgttcatagaaacgcgccatgcgctccgggtcggcgacgtacgccagcattccgctggcgagcctgtcgcctacacctgccaatcgagccgcagcccggattcgaacgtacgcctctccccgctcagcgggtcgtcgaagcgcagccccctggccagcagcttgagcggccgcaggtagtcgtcggggctgccctcggcgtccagcagctcgggatagaacccatcgttctggatacccgcgccgagtgccgcgaggtgcacgcgcagctggtgcttcttgccggtcaccggatacagccggtagcgccaccagcggccgttgcgctcgacgacctcgatgcgcgtctcgctgttcggctcgccctcgccttcgcgcatgcggaagaacggctcgccgggcaccaggcgggtcctgcgcagcaacgggaagtccagttgcggcaaggccggagcgatcgcttcgtagcacttgtcgatgcgccgctcgcggaacagcgcctggtagcgcccgcggctgccgggattggtcgagaacagcaccagcccggcggtatgccggtcgatccggtgcagcggcaccaggtcgcgattgccggtgctgcgggccagccgcgccaggagcgtctgctcgacgtagccgccggccggcatcaccggcaggaagtgcggcttgtccgccaccagcagatgctcgtcgcggtacaggatgcgcgcctcgaaaggaatcggtgcctccaccggcaactcgcggaagtagtgcacacgcaggccttcgcgatatgccgcctgcgggcccagcgcacgcccctcggcgtccagcacccggccccgctgcatgcgcgccagccaggtgtcacggtcgatggccgggaaacgcgcgcagagacagtcgagcacggtgctccagggaccggccggcagatgcagggtgctggcgcggagactggcatcgggcaaggaaggagacgacatgcggcaactcgggaaggacgggcgaccattaggccgcagcgcggcgcacaggtcaaagcacgccggggcgaaacgaagaaaccgcccgaaggcggtttcttccgtgacccagggatcgaatcaggcggcgctcgccttgcgctcttccgcctcgcaggcggctgcggtgaacagcacgtcggtcgaggagttcagcgcggtctccgcggagtcctggaggatcgcgatgatgaagcctaccgccaccacctgcatcgccacctcgctgggaatcccgaacaggctgcaggccagcgggatcagcagcagcgaaccgccggccacgccggacgcgccgcaggcgcagatcgacgccaccacgctgagcaggatcgcggtcggtacgtccacggcgatgcccagggtatgcaccgctgccagggtcagcacggtgatggtgatcgccgcgccagccatgttgatggtcgcgcccagcgggatcgataccgaataggtgtcttcgtgcaggccaaggcgctcgcagagctgcaggttgaccgggatattggctgccgagctgcgggtgaagaacgcggtcatgccgctttcgcgcaggcaggtcagcaccagcggatagggattgcggcggatcttcaggaacacgatcaacgggttgaccacgaaggccacgaacagcatgcagccgagcaacaccaccagcaggtgggcatagcctttcagggcctcgacgccggactcggcgaaggtcgaggcgaccaggccgaagatgcccagcggggcgaagcgaatcaccaccttgacgatcagcgagacgccgttggacagctcggagagcaggttgcgggtggtatcgctggcgtggcggaaggcgatgccgaggccgatggcccaggccaggatgccgatgaagttggccgagatcagggcgttgaccgggttgtccaccacgctcagcagcagggactggagcacctcggcgatgccgcccggaggcgacatctcgcccggatggctggccagcaccaggctcgaggggaaggcgaagctggcgatcaccgccaccaccgcggcgctgaaggtgccgaccaggtacagcagcaggatcggccggatatgggtctgctggccttgcctgtggttggcgatggatgccatcaccaggacgaacaccagtaccggcgcgacggccttcagcgcggaaacgaagaccttgccgatgaagccgaccttgagcgcggcggccgggaagaagctggcgagcagcaggccggcgatcaggccgacgatgatctggcccaccaggctggtacgcgtcagcagatgaagcaggggacgttcagggtatgtcatgcagatttctactcttataggtgtgtcgaaggccggcccaggcagcttccatgccgaacgaccctgtgccgttccgcccccgcgaagggatggttcgagcgagccgggtagtctagggaaggacgcgcagcaccacaggaaacaccgaccagcggataccgggctcccccgccacggccatcgaaccggatcgggacggcgtggattctagccgtgtctgcgctttttgggggcgtccaattctgtctggattcggacatgtcgtcgcaggcgcattgccagccgggaggccggaaacccctgtgaaaaggagggaaaacgcgaaattcgctgtctgcagatagccaaagcccgccatgaggcgggcttcagatggggggctagtccgttagccatgggtccatgattgacccgtcaccgtgaaaatttcgtgaagattaccaatctttttccttcacatttccgctgaatccattcaccgctcgcctcactgggtcgggctcagttcgctctcctggaagcgcggcggcggacggctgaagctgcgagtcaggtagaacaggtagccgaagcccagtccggcccagatcagccccatcaccagcgaggtgctttccaggttgagccagagcaccgcgacgatggccgcgccgagcaatggcaggaccaggtagtggaaatgctccttgaggctgcggttgcgcccgccgcgcacatagaaatgcacgatcaccgagagattgacgaaggtgaaggccaccagggcgccgaaattgatcagcgcggtcgccgtcaccaggtcgaaggagatcgccgagagcgccaccatgcccacgatgagcacgttgatcgacggcgtacgccatttcggatggacgaagccgaagatccgctccggcagcacgttgtcccgccccatcacgtacagcaggcgcgacacgctggcctgggaggccaggcccgacgccagggtattgatgaaggtggcgcagaggaagatcgactggaacagcttgccgccgacgtacagggcgatttccggcagcgccgcgtcgggttccttgaagcgtacgttggtcgggaaataggactgcaggaaatacgacacggtgatgaagatcaccccgccgtacagcgcggtgaggaagatcgcccgcgggatcaccctgccggcgtcgcgggtttcctcggacagcgtagtcaccgcgtcgaaaccgaggaaggaaaaacagaggatcgtcgcccccgccaccatcgccgagagatgcgcgtgctcggagaagaacggctgggtactgagcaccgtggcggtcccctccccgttgttcaggccgtgaatcaccaggccgatgaagaccacgatgatcgccagctggaccagcacgaagacggtattgaaattggcgaccaggttcacgctcttgatgttgatgagggtcatgatcagcacgaacatcactacccagatccacggggcgacctcggggaacaatgcggtcaggtagatcttcgccagcagtgcgttgatcatcggcaggaacaggtagtccagcagcgacgaccagccgaccatgaagccgacatggggattgatcgctcgttgcgcgtaggtataggccgagcctgcggtggggaactggcggaccagcttgccgtagctgatcgcggtgaacagcacgccggcgagggccagcaggtaggcggtgggcacgtgtccctgggaaatcccggatacgatgccgaaggtgtcgaagacggtcatcggggtcaggtaggccaacccgatcatgacgatctgccacagcttgagggacttgcgaagctgggttcgttctgcggtggggggaggattcgacatgggtatgcttgcctcgatttcttctttttctaatgcacagcaaaggaaggcggacgggcggaaaccgcaggcttgccgccgtctaccttcagcaagggtgggaacctcgacggaagaacgggcgggcggcgccggaccggagccgcccgcccatgctcacacggtgtgcaggtaccagttgtactcgaggtcggagatcgagtactcgaactcctccagctcgctttccttgcaggcgacgaagatgtcgatgtacttcggatcgatgtacttcgccaggatctcgctgtcgtccagttcgcgcagggcgtcgcgcaggttgttcggcaggctcggctccaactgctcgtaggagttgccttcgatcggggcacccggctcgaccttgttggtcagcccgtggtgcaccccggcaagcaccgaggccagcagcaggtaggggttggcgtcggcgccggcgacgcgatgttccaggcgtaccgcgtccgggctgccggtgggcacgcgcagggccacggtgcggttgtccaggccccagctcggcgcgttcggcacgtagaactgcgaaccgaagcggcggtaggagttgacgttcgggcagaggaaggccatggaggccggcagggtctcgagcacgccgccgatcgcatggcgcaatgcggcgttctgctcgggatcctcgctggtgaagatgttgttgccgtgcttgtcgagcagcgagatgtgtacgtgcagtccgttcccggcctggcccggatagggcttggccatgaaggtggtgtccatctcatggtcgtaggcgatgttcttgatcaggcgcttgagcagcaccgcatagtcgcaggccttcatcgggtcggcgacgtgatgcaggttgacctcgaactgcgccggtgcggattcggcgacgatggcgtcggccgggatgccctgggcgcgggcgccgtcgatgatgtcctggaggcactcgacgtattcgtcgaggtcgtcgatggagtacacctgcaccgactgcggacgcttgccggagatcggcgagcgcggcggctgcggccggccgttcacgttctcctggtcgatcaggtagaactccagctcgaaggcggcgacgatggtcagttccatctcggtgaacctggccaccacctggcgcaggacttcgcgggggtcggcgaagaagggatcaccttccagctcatgcatggtcatcagcagttgcgcggtcgggcgcttctgccagggttccatggagagggtgccggggatcgggtagcagatccggtcggcgtcgccgatgtcgagacccaggccggtactctctacggtggagccggtgatatcgagggcgaacagggaagcgggaaggttgatacctttttcgaagactttgggcagactgttgcgttcgattcgcttgccgcgaaccacgccattcatgtctgaaatcagaaggtcgacgaactggacctcgggatgttcctgaaggaacaggctcggctcagtgagctgaacggcacgcaggggtaccgacatgatgcaacaccttttttgttaaaaatttcaatcatgcgggggctggagccagagtcaatcggaaagccaatttgttgtcaatagccctctcgtcgccctcgcggacggcgaaatggccgtagacagggccttccagcgcatcgcgaaagcggccaaagccaggccaggcaaggtgttcaacctggtgcagcagatattttacaggctccgttgtacgaaaaattgaacaaggctaagctgtgccaaccctacaacagcaataaaccgggtgttccatgtcctaccagccgtccctcggcgccaagttccgcggccacaagatcggtcagcatccgcgttagctccgctccggttcttctctccctcgattcttcgcagcgccctcgagcggccctcgctcgtccgccgcctgccctgcccgtcctccttatataaggaaggacaccggccgctttcgcctgcgtggataacggatacgaagagcaagatcgttcaagccagcccgatgcgcctgctggcatgctggaccgacgttcaccaccgccatgcccccatgactgcccacgacctgccccgccaagcctttctccgcggcgccgtcgccatcctcccattgtccctggccgtcgcgccctgggggctgctggcgggatcgatggccatcgaagccaacctcaccccggccgagggccagggcctgtccgccatcgtcttcgccggcgccgcccagttggtggcgatcggcatgctcaagggcggtgccgggttcttttcgatcatcttcaccaccctcctcctgacctcgcagcacctgctctacggcatgagcttgcggccggtcctgtcgcctctgccgggacgctggcggatcggcctgggcttcctgctcaccgacgagttcttcgccctcgccagccagcacgaccggcgcaacttcaaccgctggtacgccctcggcgtcggcctgaccttctatatcgcctggaacctgttcaccctcgccggcatcctgcttggccgcagcattcccggtctcgaacacctgggcctggatttctccatcgccgccaccttcatcgcgctggtcgcgccgctggtgcgcaacgtaccgacgctggtctgcgtggccacctcgctgttctgctcggtgctgttcagccactggcaatggagttcggcgctggtcctcgccggtctcgccgggatggccgccggtttcatctgcaacaagctgtatcgggaggcgccatggtctgggcagtgatcttcgggatgggcgcgatcgtcttcctcaaccgctacctgttcctcgaaccgcgcctgccgatccgcctcggcagcaacctgcggcagttcctcggtttcgccgtgccgggaatgctcacggcgatctgcggccccatcgtgttcatgcccgagggccgcatcgacctcggctacgacaatccctacctggtcagcggcgcagtcaccgtggcgctggtgctctatacccgcaataccctggcgagcatgctgctgggcatggcgttcttcttcctgttcaagtggttggtctgagtggactccatagcagccacgtggatagtcgggaggaatccatatagaagtccgcagcgacgagtgcggtagacgaaagctcccgacgcctcgcctggctgccgaacttcctgtatgccttcgcaacagaggaatgccaggttcatgcgccacgagaatgaactcgcgaagaaaggtcgcttggcgctggcgcgctttgggccgaagatcggggcaaccacaacgtgcgcagcgaggccctcatgtccgactcccttccccagcgcaacggcgggcagatcctggtagaggcattgcggcgcaatgccgtcgataccgtctactgcatccccggggaaagctacctgccggtgctcgatgcgctgcacgacgccgacggcatccgcaccatcgtcacccgccacgagggtgccgcctcgaacatggccgatgcctacggcaagctgaccggccgaccaggcatctgcttcgtcacccgcggccccggtgccacccatgcggcgaatggcgtgcacacggcgcagcaggactcgacgccgatgatcctgttcgtcggccaggtggaaagcgccttcaagggccgcgaggcgttccaggaagtcgactacgtgcagatgttctcgggcctggccaagtgggccgtggaaatcgaccgtatcgaacgcatcccggagatcgtcggccgcgccttcagcgtcgccacctcgggccgaccgggcccggtcgtggtcgccctgcccgaggaaatcctcttcggtttcgcgcaggtcgccgatgcgccggagccaagggtgcttccggggcggccgggcgccacggcgatggcggaactgcgcgaactgctggcgaacgccaggcgccccctgctggtacttggcggcagcggctgggacagtgccgccaggaaacggctaggcgccttcgtcgaggccaatggcctgccggtggccacctcgttccgtcgccaggacctgttcgacaaccgtgacccgcactacgccggacaactgggcttcggcgcggcgccggcgctattggagcggctgcgccaggccgacctgctgctggtggtcggggcgcgcctgggcgaaacgccgagcgccggctacagcctggtgcgtagtccggcccccgcgcagacgctgatccacgtgcatccggacagcgcggaactgaaccgcgtctacctggcgcgactgccgatccaggccaccccgtgtgccttcgccgaggccctggccgacctcgcgccgttgccctcgagcacctggcaggactggcgcgaagccgcccatgccgactacctggcctactcgaccccggccgcgagcgaccccgccatccagggcgtcgacctggcgtccgtggtcgcgtacctcagcgaaaacctgccggacgacgcggtgatcgccaacggtgccggcaactatgccgtctgggtgcatcgcttctaccgctatcgccaggcccgcacgcagttggcgccgaccaacggcgccatgggctacggcctgcccgccgcgatcgccgccagcctgcgcgatccgcagcgcagcgtggtgtgcttcgccggcgacggctgtttcatgatgtatccgcaggagctggcgaccgccgcgcagttcggcgcgacgccggtggtgatcgtggtcaacaacggcatgctcggcaccatccgcatgcatcaggaacgcgaatatcccgggcgggtatccgccacccgcctggacaaccccgacttcgtcgccctggcgcgagccttcggcgcccacgccgaacgagtggagtgcagcgccgacttccccgccgcgttccgccgcgcccgcgaaagcggacgcccggcgctgctggagctgctgaccgacccgcgccagatcacgccgcaggcgcgcctcgcctgaggcatcctcagccggcgcggaaggcgatccaggcctggtagcccacggcctggaaatagcggctgggcaggacgaagccggtgtcttccagcagttcgccgaggcgctgctcggacaacggatcgaaatcctcgcgcaagcgttgcagcatgccgtcactgtcctccggggaaagcccggccaagcggcaggcctcggcctgcaccgggcgttcgaaggcgtcccgggcttccatcaggttggccagcagcaacggtgccgctggcgccagacgctcggcgaccgcctcgaggaagcgccgcttggcctggtcgccgcgcaggaaatgcagcaccagcaggaccagcgccgcatcgcaaggcggcgctggcggtagcccggcgacgtcgccgcaatgcagctcgatccgctccagcaggccgagcctggcgcagcgctggcgggccagggcgagcatgtcggccgacaggtccgccgcgacgaagcgccagcccggacgcaacccggccagctccgccagttcgccgccggcgccgcagccgacgctgagcaggcgcgcccgctccggcagacgggccagcaactgcgcgcgactgagcaggtgcagcaactcgtagcccggcaacaggcggccgatccgcgtctcgtagccgtccgcctgtttcccgacgaagcggcccatcagtcgaacaccttgcccaggcgccaatagcccatcagggtcagatgacgcttgtcgataccgcgctcctgcaccaggtagcgccggatcgccatcaccgccgccgactcgccggcgacccaggcgtagaaactgccgctctcggggctcgccagttcccagaggatctcctcgtcgatatcgatgtcctccagctcctgggccgcaccacccgccacctcgcgctccggcagccgcgcctggcgcgccgcctcgaccatccgctcgccgttgcgcgaatggatgccggcctggtggcgcggcagccagtgcaggcgcgcagcgggaatcgccggcaggtcgaggatatcggcttctcccggcacttcgagaaaggcctcgaccaccggcggctcggcttcgccggccagctcctcgagaattcccgccaccgcgggcaaggcggtttcgtcggcgatcagcaggatgtggcggacgccagccggcggtttccattcgtagccgccggggtcatcgccgtattgccggttgggcgcggccagttgcaggcggtcgccgatccgcgcgtgggtcgcccaggccgaggccgggccgttctcgccgtggaggacgaactccacgtcgacctcctcctgctcggcgcgcagcgcacggatggtgtaggtacgcatcggcggccggcgagccggctcgacgctgcgataggcctggtaccactcgctgccaccgggcaggctgggcggctggccgctggcatcggggaagaagatcttgatccgctggtcggcggccagggtcttcatctcggcgacctccgggccgccgaagacgaagcgggtcagcgccgggctgagttgctcgcggcgcttgagttcgacattgaacagacgataggcgggttgcgacatgacgatggtctcctggtgaccggcgcccagcggcgccggcggatgcatgcatcaggcaactctagcaaacaatgcgaatgattagcatttgctatttgtgcaatcgtcgactgcgtcgaaagcacgactgccgctcaggcctcgcaaggctccagcagctcgcaagcgctctcccctactcgcctgaccgcctgctcgatggccggggtcggcaacgccgcgtagttcatccgcaggcagttccggtacttgccggaagcggagaagatgcagcccaccgcgacttgtacgccgcggttgcgcaaggccttgtccaggcgcagggtgtcgaacgcctcgtccagttcgacccagagcaggaaaccgccctggggccggctggcgcgggtgccctccgggaaatagcgcgccacccagtcgatcatcaggtcgcgtccgcgctggtactgggcgcgcatgcgccgcaagtgcggctcgtagtggccgttgccgatgaattcggcgatcgccagttgcggttgcagggcgctggcgccggtactgatgtacttcatgtgcagcacgcggtcggcgtagcgcccgggtaccatccagccgatccgcaggcccggcgccaggaccttggagaacgacccgcagagcagcacccggccatcgtcgtcgtacgacttgatggtgcgcgggcgcggataggtgtaggccaggtcgccatagacatcgtcctcgatgatcgccacgtcgtagcgctgggccagggccagcagcgcccgcttgcgcgactcgggcatgatgtagccgagcgggttgttgcagttcggggtcacctggatggccttgatcggccactgttccagcgccagttcgagggcttccaggctgatgccgttgaccggatcggtggggatctccagggccttcatgccgaggcctttcagcgattgcatggcgccatggaagctcggcgattccaccgcgacgatgtcgcccggttcgcacaccgcgcggatgctcaccgacagggcctcgtggcagccggtggtgatcaccacgtcgctggcggtggctcgacagccggagtccaccaacaggcgggcgacttcctcgcgcagcaacggcgagccgtggatcccgtcgtaggccagcgcacgggcgtcggcgtggcggttgagccgggccaggctgcgggtcagcggtttcagcgaagggctggagatgtccggcatgccgcggccgagctggaccacgtccggccgcggtaccgtgctgaccagggccagcacctgctcccattgcgagatttccaccggccgctgggccaggcgggcgatcgccggcagcggcggcatctgtcgcgcgaccggtacgaaatagccggacttcggccgcggctcggccagcccgcgatcttccagcagcctgtatgcctgttgcacggtgctcaggctgacgccgtgctcgatgctcatggcccgcaccgagggcagccggtcgcccggacggtagaggccctgttcgatgcgcgaaccgagggtctcggcgagttgcagataaagggtcatgagcgggactccagggtgagcgaaagcgggaccggtacagatggtggcgaaatccaccattcaggccggggagcgcttgatctgtatgcagtcaacccaccttttctggacctgtacggaacagcgcgcgatggccattctatctccgtcgtccagccgatcaatatggagtacgcagcatgacgcgactcagtgcgaaatccgagcgccgccaacgcctcgatggccccttcccactcgccgcgatggacaacctggcgcaggccctgcgtcgcggctatcgcctggcccggcaacgccagctgacccggcgcgcgctgctggacctggaagcggcggaactgaaggatatcggcctgagcgccgagcaggcccgcgaggaagcctcgctggcgttctggcaggcaggaaaatccggcgggaggaaggcatgatccgctgtcgcaactgtggcgaacgcccagccagcgaagggcatatctgtatggtctgcaagcgccgatccgacatcgacccatacaaggcgctgatcgccatggccctgctggtctactgcggcgtcagcctggcggcctacctcaagccgcatatgccggcaccgccgcctaccgccggcagcagcgtccagcccgccgaggagctggcccagcgcgcccgccaggccaccctggaacagcgcggcatctgaagaacgcatgctcgggaggggaggcagtttgagcccctccttcttttatatgcctgtggccgccagcgcgtggctcattccgccggatactccagcgccgccgcgattcgccgatgctgctcgaccacccactcccgccgtaccgccccccagtcgcggatgacatagccgccctggtggttgcgcgcaccctcccgctgctcgaactcgcagacgatgtccagttcctccagcgcggcgatggtgtcctgtgcggtacgccggggcatgccggtggcggccatgatctccggcacgctggcggtgccgctgtcgatcaggtaggcgacgtagaggcggcggtagaagctggacttggtcttgctgatggtcatgggcaggcgttctccgggaaggctcagggagcgagcaggggcaaggtagtggtggatttgatttccgacaaggcgacgatggagttcacttcctggatgcccggcaccgccgacagtttctcgaagaaaaagcgttcgtaggattcgatatcgcgggtgacgatacgcagcatgaagtccaccgcgcccatcagtacgtggcactccagcacctcgggaaactggtgcatcgcctcggcgaaatcggtgaggttcttgcgcccatgggcgttgagcttaatctgggcgaatacctgggtattcaggccgatcttcttgcggtcgagcagggtcacctgcttgcggatcaccccctcctccttcaggcgctggatgcgccgccagcagggcgactgggaaagtccgatgcgctcggcgatctcggcggtggaaagcgaggattcctcctgcagcaacgcaagaatacgctgatcgtagatatccaatggaatggacataaatattctctacaaagaaaaatataggaatcaagtatgcacatatagcgcaaaatcacgcaaaaacaggagaaaaaatccggcacgcctctgggagaatttctctcgtcgaaacactgcctggagcgtcacatgtcaaccctcgccccccttttcctggccaaacaccctgacggcgaagaacgccaggtgatccgcccgaacgtctgggaaacctcctgcgcagataccgagaccctgtcgatcttccatatcgagggcatggccgatccggacctgctgtgccgggtgctcaacctgttcgccgtgcaatccttcaccccggagcgggttcgcgccgaccgcgaggaccacaagatccgcctgctgctgaccttccccggcctcagccagcaccgcgccagcgtgatcgcggagaagctgcgctcgctggtcaccgtgctcgccgtccgcctggagttctctccccatgccggcaaggtccgtcccagcgtcagcgagccgctgctggccagcgtcgtctgagcccctcggggcggcgcggcggccgccctgtccattcggcgtcatcggctggccttctggcgttagccggtcgcccagcccatggctacagtgcaggttcgccaggcagccagaagactgccatgtgttcccccgatcctgcagagcgtgcccatgtcccgaccgcgtttccttccggataacttcaccctggcgctgatcgccaccgtccttctcgccactttcctgccctgcagcggccagaccgccgtggtcttcgaatgggtgaccaacatcggcatcggcctgctgttcttcctccacggcgccaagctgtcgcgccaggcgatcatcgccggcatgacccactggcgcctgcacctgctggtgttcgcctgcactttcgtgatgttcccgctgctcggcctggcgctgaaaccggcactgtcgccgatggtcaccccggagctgtacctcggcatcctgttcctctgcgccctgccggccacggtgcaatcctccatcgccttcacctcgctggcgcgcggcaacgtgccggcagcggtatgcagcgcttccgtgtcgagcctgctcggcgtattccttaccccgctgctggtcaagctgctgctcggcgccgaaggcgagaccggcaacgcgctggacgccatcggcaagatcaccctgcaactgctggtacccttcatcgctggccaggtcctacggcgctggatcggcgcctgggtggagcgcaacaagccggtgctgcgctatgtcgaccagggctcgatcctgctggtggtctacaccgccttcagcgccgcggtgatccagggcctgtggcacgaagtaccctggctggcgctgctcggcctgaccgtcgcctgctgcgtgatcctcgccctggccctggtgctgaccacggtgctggcgcgacgcctgggcttcagcaaggaagacgagatcaccatcgtcttctgcggttcgaagaagagcctggccaccggcgtgcccatggccaaggtgctgttcgccaccagtgcggtgggaccgatggtgttgccgctgatgctgttccaccagatccagctgatggtctgcgcggtactcgcgcaacgctacgccaggcgccgcgatgacacagcggcggcgctggccgaggccccctcgcgctgagcgcgaaaatgaaagaagccggcccaggggccggcttcttcgttcagacgcggctcagcgcgtcggcgtgcgcagggtgacgaactcttccgccgcggtcgggtggatgccgatggtctcgtcgaacgcctgcttggtcgccccggccttcatcgccaccgcaataccctggaggatctcgccggcctcggcgccgaccatgtggcaacccagcaccctgtcgtcgtgggcatccacgaccagcttcatcagggtcttttcctggtcgtcggtaagggtcagcttcatcggccggaagcggctctcgaagatcttcaccttgtgcccggcgctcagcgcctcctcctcggtcaggccgacggtgccgatgttgggcaggctgaacaccgcggtgggaatcaacttgtagtccaccgggcgatactcctccggcttgaacaatcgccgcgccaccgccatgccctcggccagcgccacgggggtcaactggacgcgaccgatcacgtcgccgagggcgaggatcgacggctcgctggtctggtagtgctcgtcgaccgcgatgaagcccttgtcggtcagcttcacagctgtgttttccaggcccaggtcgtccagcatcggccgccgcccggtggcgtagaacacgcagtccgcctccagcacccggccgtccttgagggtcgcggccaggctgccatcggcctgtttgtcgatacgggcgatgtcgctgttgaactgcaggtccaggcccttcttgcccaattcgtcgcgcagatgctcgcggacgctgcggtcgaagccgcgcaggaacaggtcgcgacggtagagcaaggtggtctcggcgccgagcccgttgaagatcgaggcgaactcgacggcgatgtagccgccgccgaccaccagcacgcggcgcggcaggcgctcgaggaagaacgcttcgttggaggtgatcgcgtgttccttgccgggaatgtccggcacctgcggccagccaccggtggcgacgagaatgtgcttggcgctgaagcgctggccgtccacctcgacgctgtgcgcatcgagcagacgggcgtgaccttagagcaaggtcaccccgctgttcaccagcaggttgcggtagatcccgttgagccgctggatctcgcggttcttgttgccgatcagggtcgcccagtcgaactgcgcctcgccggcgctccagccataggcccgggcctgctcgaagtcctcgctgaaatgcgcgccatagaccagcagcttcttcggcacgcagccgacgttgacgcaggtgccacccaggtagcgactctccgccaccgcgacacgggcaccgaagccggcggcgaagcgggcggcgcgtacgccccctgagccggcgccgatgacgaacagatcgaaatcgaaagacatgttcctactcctggatcagatgcgttccagcataacccattcaccagcgtcggctcccgccggatcgacgcagaaacctgtcgaaacggctcagcgcagggcctggcaggcgatgggctatgcttgtccgtggaggtaagcgcgatgtcccccaccctcacccacctggcgctgcacgtccccgacctcgacgcctgcatcgccttctacgaaaccttctgcggcatgcgggtgatccaccggcgccccggcaaaggctcgcaaatcgtctggatggccgaacccggccaggaacaacgcttcatcttcgtcatcatgcccggcggccagccgcgcaacctggccagcgacgattacagtcatttcggcttcgccctctccagccgcgccgcggtagacgatctggcgcgccgcgccgaggccgccggctgcctggtctgggcgccgcgcgacgagccctatccggtcggctactactgcggcctgcgcgatcccgcgggcaactatgtggagttcagctacggccagccgctgggcccgggttccgaggcgctgccgattccctgaccgggcgcggaggcgccgcgtggcccaggccaggctggcggggttattcgcccgacgccaacaacgccacgcccgccgacagctcaggtagggcggataccccccatggccgttcgccccatacgaaaaacgccgcgcccccatcggggacgcggcgttcttcatcgggaacggcgaggctcagtgagccttgccggtcttgtagaggttttcgtagcagaagttggtcgcctcgatgtaaccctcggcgctgccgcagtcgaaacgcttgcccttgaacttgtaggccagcacgcagccgtcctgggcctgcttcatcagggcatcggtgatctggatctcgccgcccttgcccggttcagtctgctcgatcaggtcgaagatgtccggggtcaggatgtagcggccgatgatcgccaggttcgacggcgcctcttccggcttcggcttctcgaccatggtgttcacccggaagatatcgtcgcggatcatctcgccggcgatcacgccgtacttgttggtctcttccggcggcacttcctggatcgccacgatggagcagcggaactggttgtacagcttgaccatctgcttcagcacgctgtcgccttcgaggttcaggcacaggtcgtcggccaggaccacggcgaacggctcgtcgccgatcagcggacgaccggtgaggatggcgtggccgaggcccttcatctccacctggcgggtgtaggcgaaggtgcactcgtcgatcagccgacggatgccgaccaggtacttttccttgtcggtgttgcggatctggtgttccagctcgtagctgatgtcgaagtggtcttccagcgaacgcttgccgcggccggtgacgatgccgatctcggaaaggccggcttccagcgcctcctccaccgcgtactggatcagcggcttgttcaccaccggcagcatttccttgggcatggccttggtggccgggaggaaacgagtgccgtaaccggcggccgggaaaagacatttcttgatcatgagaatccttcgacatggacgaagtatgcggatggcgcgcagtctaatcaggctgcgctcgccttacaatgcccggcccttggacgtcctatgccctggtagatgaagcccagttccgccatccgcgccggtgcgtagagattccgaccgtcgaccaacaggggagttcgcatggatccacggattttctggaagtccggctggcggaactgtttccactcggtcaccagcaccagggcatcggcgccctcgacggccgcgtagggcgagtcgtggagcgtcaactgggcgcacgccagcgcgtccggatagcgtgccgcgaccccggcgttggccaccgggtcatgggccctgacccgcaccccgtggcgcagcagcgcctccagcaggaccaggctcggcgcctcgcgcaggtcgtcggtacccggcttgaaggccagcccccagagcgccaccgtgcgcccttgccagcgtccctggaacagttcgccgagggtctcgaagagcagttccttctgccgcgcgttgcgcgcttccaccgcacgcagtatctggctgtcgaagccctgttgctcggcgctgcggatcagcgcgcggacgtccttgggaaagcacgagccgccgtagccgcagccggcgtagatgaaatgggtaccgatgcgcttgtcgctacccatgccgcggcgcacgtcctcgatgtcgacgccggtgagggcgcacagcccggccatctcgttcatgaaggaaatcttggtggcgaggaaggcattggccgcgtacttgctgaactcggcctcgcggcgccccatcagcaggacccgttcgtgattgcgcaggaacggcgcgtagagctggcgcagggtttccccggcctgcgtctcggcgctgccgatgatgacccggtccgggcgcctgaagtcgtccaccgccgagccttccttgaggaactccggattgctcgccaccgccacccggaagcgcttgcgccggcgcgccaggcccaggcggatgatctcttcgacccgttcggcggtgcccaccggcacggtcgacttgttgaccacgatgcaggcctggcgcagttgcgcgccaagttgctcggcgaccgccagcacgtggctgaggtcggccgagccgtcctcgccgcacggcgtgccgacggcgatgaacaccacctcggcgtcggccaggccttccgccaggctggcggtgaaggtcaggcgggcggcgtccagctgatcgcgcaggatgctttccaggcccggttcgtagatcggcatctcgccgcgtctcagccgcgcgacccgctcgcggtcacgctccacgcaacgcacctggttgcccatctcggcgaaacaggccgccgtcaccagtcccacatagcccgcaccaatcacgcatagccgcatggcgtcgtcctccgctggcctcgccctctctctgcggacgattgcagccaagcgcggtggcaggcgcgtgacgctggcgtgaagctaccgtgacagaacccgcgcggatgcccggggtccacccaaggtaggcggagaaaacgggaggttcccatgtccatcgaaatcgattcggaacaaggcatctgcagcgtggagatcgaaggcagccggcatcgcgcgccggtcgacagcctgcgcatcggtaccgacgccgaggcgcgcctgtcggtgctctacatcgacggcaagcgcctgcacatcagcgaggaagacgcccagcggctggtggtcgccggcgccgaggaccagcgcaggcacctgatggcggacgattgacgccctcatgcgtccgccagcaacaggtagggagaactgcgcaggctgtcgaggccggcgcggaacatgcgttcggcgcggttccagggatcgtcgcgcaggcgctcggtccaggccagggtgccgcagatgccgtcccagagcgattgcagatagatgctggccagctcgacgtccagccgcgccggcagttcgccgcgctccaccgcccggcggatctgccggaggccgaagcgttgcccctgcttctcgggcagctcgcggcggcgcagcagcggctcgttctcgtcgctgcgttcgcacttgaggtagaggatctccagcacccgctgcaccgaaccgggctcgcagcactggcggagaaagcccatgccggcgcgcaggaggatgtccagcgccggcaccctggcgttttcgtcgggtacctcgatctggccgaaggcgcggtcgcacatcgccaggcagacctcgatcttgttcttgtagtggccgtagaccgcaccgcgagaaaccccggcggcgtccgccaggtcggccatggcagtagtgcccacgcccttttccaggaaaacccgctcggcggcatcgagtatgccgtcgcgggttttctgggattcctctttggttttcctggccactgaacgtcctcacaagggaaaggcgccgcagatcataaggatatgttacagaaacgccaattaattaatcactcatgattgattatatgctactgtcgcgccgctcgtgagttgcggtgccctttcccgggcaagctcgcgagttcacgaatcgagggacacccatgcacatccaatggaccggctcgctgcgcgggctgctggcggccctggtcgccctattcctgctgggctgcgaagaagcagcggacgccgggaagactgcggaggcccccgccgaggtcggcgtgatcgtcgccaggccggcgcctatcggcatcaccagcgagctgcccggacgcctggaagcgtaccgccaggctgaagtgcgggcgcgcgtcgccggcatcgtcacccgtcgcctgtacgaggaaggccaggacgtccgcgccggcaccgtgctgttccagatcgaccctgcgcccttgaaggcggccctggacatcagccgcggcgccctggcccgggccgaggccagccacgcggcggcggccgacaagctcaagcgctacgccgacctgatcaaggaccgcgccatcagcgaacgcgagtacaccgaagcgcagaccgacgcgcgccaggccctggcgcagatcgcctcggccaaggccgaactggagcaggcccgcctgcgcctgggctacgccacggtcaccgcgccgatcgacggccgcgcgcggcgcgcgctggtcaccgaaggcgcgctggtcggcgaggactcgccgacacctctgacccgcgtcgagcagatcgatccgatctacgtgaacttctcccagccggccggcgaagtcgccgccatgcagcgggcgatccgcgaaggccaggtgaagggtgtcgccgacaaggacatcgccgtgcgcctggtcctggccgacggcagcgagtacccgctggccggcgagctgctgttctccgacctggcggtcgaccccggcaccgacaccatcgccatgcgtgccctgttccgcaatccgcatcgcgaattgctgcccggcggctacgtgcaggtgcgcctgcagcgcgcggtgaacccgcaggcgatcaccgtcccgcgcgacgcgctgatccgtaccgcccagtccgccgtggtcaaggtggtcaacccacagggcttggtggaagacgtggaggtccgcgccgacaccctgcagggccgcgactggatcatcagcagcgggctcaagggcggcgagcgtgtgatcgtcgagaacgccgcccagcatgccgccggctccagcgtccaggcggtggtccgccagccggccagcgccgacgccccctcaccgctggccgcctcgccggcgggccagtgacggagaacgctacgaatggctcgtttcttcattgaccggccggtcttcgcctgggtgatctccctgctgatcgtgctcgccggggtcctggcgatccgcttcctgccggtcgcccagtacccggacatcgcgccgccggtggtcaacgtcagcgccagctatcccggcgcctcggccaaggtggtcgaggaagcggtgaccgcgatcatcgagcgcgagatgaacggcgcgcccggcctgctctacaccaaggccaccagcagcaccggccaggcctcgctgaccctgaccttccgccagggcgtgaacgccgacctcgccgcggtggaagtgcagaaccgcctgaagatcgtcgagtcgcgcctgcccgaatcggtgcggcgcgacggcatctacgtggagaaggcggcggacagcatccagctgatcgttacccttacctcctccagcggccgctacgacgccatggacctgggcgagatcgcctcgtccaacgtgttgcaggcgctgcgccgggtggagggcgtgggcaaggtcgagacctggggcgccgagtacgccatgcgcatctggcccgacccggccaagctgacctcgatgaacctcagcgccagcgacctggtcaacgccgtgcgccggcacaacgcccgcctcaccgtgggcgacatcggcaacctcggggtccccgactcggcgccgatcagcgccacggtgaaggtcgacgacaccctggtgacgcccgagcagttcggcgaaattccgctgcgcatccgcgccgacggcggcgcgatccgcctgcgcgacgtggcccgcgtcgagttcggccagagcgagtacggcttcgtctcgcgggtcaaccagatgaccgccaccggcctggcggtgaagatggcgcccggctccaacgcggtggccaccgccaagcgcatccgcgccaccctcgacgagctgtcgcgctacttcccggagggcgtgagctacaacatcccctatgacacctcggcgttcgtcgagatctcgatcaggaaggtggtcagcaccctgctcgaggcgatgctgctggtgttcgccgtgatgtacctgttcatgcagaacttccgcgccaccctgatcccgacactggtggtgccggtggccctgctgggcaccttcacggtgatgctcggcctgggcttctcgatcaacgtgctgaccatgttcggcatggtcctggcgatcggcatcctggtggacgacgcgatcatcgtggtggagaacgtcgagcggctgatggccgaggaaggcctgtcgccgcacgacgccacggtcaaggcgatgcgccagatcagcggggccatcgtcggcatcaccgtggtgctggtctcggtgttcgtgccgatggcgttcttcagcggcgcggtgggcaacatctaccgccagttcgcggtgaccctggcggtctccatcggcttctcggcgttcctcgcgctgtcgctgaccccggccctgtgcgccaccctgctgcgcccgatcgacgccgaccaccatgagaagcgcggcttcttcggctggttcaaccgcgccttcctgcgcctgaccggacgctaccgcaacgcggtggccggcatcctcgcccggccgatccgctggatgctggtctacgccctggtcatcggcgtggtcgccctgctcttcgtgcgcctgccgcaggcgttcctgccggaagaggaccagggcgacttcatgatcatggtgatgcagcccgaaggcacgccgatggcggagaccatggccaacgtcggcgacgtcgagcgctacctggcggagcacgaaccggtggcctacgcctatgcggtcggcggcttcagcctgtacggcgacggcaccagctcggcgatgatcttcgccaccctgaaggactggtcggaacgccgggaggccagccagcacgtcggcgccatcgtcgagcgcatcaaccagcgcttcgccggcctgcccaaccgtacggtgtatgcgatgaactcgccgccgctgccggacctgggttccaccagcggcttcgacttccgcctgcaggaccgtggcggggttggctacgaggccctggtcaaggcccgcgaccagttgctggcgcgcgccgccgaggacccgcgcctggccaacgtgatgttcgccggccagggcgaggcgccgcagatccgcctggacatcgaccggcgcaaggcggagaccctcggcgtgagcatggacgagatcaacaccaccctggcggtgatgttcggctcggactacatcggcgacttcatgcacggcagccaggtgcgcaaggtggtggtccaggccgacggcgccaagcgcctgggcatcgacgacatcggccggcttcacgtgcgcaacgagcagggcgagatggtgccgctggcgacgttcgccaaggccgcctggaccctcggcccgccgcaactgacccgctacaacggctatccctcgttcaacctcgagggccaggccgcgccgggctacagcagcggcgaagccatgcaggcgatggaggaattgatgcagggcctgcccgagggcatcgcccacgagtggtccggccagtccttcgaagaacgcctgtccggcgcccaggcgccggcgctgttcgccctctcggtgttgatcgtgttcctcgccctggccgccctctacgaaagctggtcgatcccgctggcggtgatcctggtggtgccgctgggcgtactcggcgcactgctcggggtgagcctgcgcggtctgcccaacgacatctacttcaaggtcggcctgatcaccatcatcggcctctcggcgaagaacgccatcctcatcatcgaggtggccaaggaccattaccaggaaggcatgagcctgctgcaggcgaccctggaggccgcgcgcctgcgcctgcgaccgatcgtcatgacctcgctggcgttcggtttcggcgtgatcccgctggcgctctccagcggcgccggttccggcgcccaggtcgccatcggcaccggggtgctcggcgggatcgtcaccgccacggtactcgcggtgttcctggtaccgctgttcttcctggtggtcgggcgcctgttccggttgcgcaaggcgccgcgcaccggcaactcgccccagatccccacggagcaagcctgatgcccctagcgaaactctcgctccccaccctggcactgtgcgtcgggctgctcggcgcctgctcgccgacgcctcgccagccgcgcgcggcccccatcgttccggccaacggccccgaccttcggggcaagctggacgactggcaacagcagttcaccgacccgctgctgcgacagatgatcggctacgcgccggcgctatccggcgcgcaagcctgaattccgccgtccttttcccaccctagtcggccgctggcagcgctcggctgaagcggtagaacaggttcggctcgctgaccacgtacaggctgccccggtcgtccatcgccaacccttcggcctgcggcacgtcgtccgtcaggccatggttgccgccacgcagggtcaggctgccgagcggatccccggcgcgatccagttcgatgaccacccgcgactcgtcggaaagcaccagcaggtgatcgctggccttgtcgtagtagaggctcgacagatcggtgaggaacaacccgcgatcgcgctgcgggtcgccgccgacgctcaggtcgagcgcctcgccgcggtcgttgaagaagccgtttacctcgatgatgcccaccggcgccttttcccgggccacgaacaggcgctcgcgcagcgggtcgtaggccaacccctcgaagcccttgttgcgcttgtttgcactgcccagggagaacttccgggcgttgcgcggatcgtcgatgtcgatcacccgggtgtcggcgtcgacatggatctccaccaggcgttggcgacgctcctcggcgaccacgtagacgccgggccggatgtactcgatagcctccggatcctggaaaccgcgcagggggatgcgtcgcagcaattcgccgtccagcgacagctcgaggaaatgcgggtcctggttggtcacgctgaccaggctgcgccggctggggtcgaaggacagcgccgacacgttggactccgcgcccagcacgcgggcttcgatatcgacccgatagtcggccaggcgcagggcgttctcgcgcgcaacatcgccgccgtagcgctgctccagcttgaaccagattcgctcgaacgcgcgctgctgctggcccgccaccagcagcgcaagcaacgcggcgagcaggcaagccagcagcgtcctgtaggtcatcagccgactcatcgttacgactcctccgagaaacacagtgttcggcgaagcagaacagagccatccgcgccctttcatgaggcgtcgattaaatctttctgacaagcatctttcacggctgtcatttttcccccgttccaggcgttgacaggatttcggtgcagctttacgttaacgtaaaggtaaacaagcaggtgcctgcgcatgtccatcacctacaccatctccgatctcgcccgcgaactggacatcaccacccgcgccatccgcttctacgaggagcaaggcctgctctcccccgagcgacgcggccaggaacgcatctattcgccgcgcgacaaggtcagcctgaagctgatcctgcgcggcaagcgcatcggtttttccctcgccgaatgccgcgaactgatcgagctctacgacccggacccgagcagcggcaaccagaagcagttgaacaccatgctggagaagatcgccgagcgccgcgcccagctggaacaacagttgctggacatcgaacagatgcagctggaactggatactgccgaggagcgctgtcgagcggcgcttatcaaaagctataacaaacatacagttgaaacataaacctcattcaaagctttaaaccggacaagcacaattacaggtgaaagcatgacctatcccagcctcaacttcgccctcggcgaaaccatcgacatgctccgcgaccaggtgcgcggcttcgtcgccgccgaactgcagccgcgcgccgcgcagatcgaccaggacaaccagttccccatggacatgtggcgcaagttcggcgagatgggcctgctcggcatcaccgtcgacgaggagtacggcggttcggcgctgggctacctggcccacgccgtggtcatggaagagatcagccgggcctcggcctcggtggcgctctcctatggcgcgcattccaacctctgcgtcaaccagatcaagcgcaacggcaacgccgaacagaaggcccgctacctgccggccctggtatccggcgaacatatcggtgcgctggcgatgagcgaacccaacgccggctccgacgtggtctcgatgaagctgcgcgcggaccgggtcggcgaccgcttcgttctcaacggcagcaagatgtggatcaccaacggtcccgatgcccatacctatgtgatctacgccaagaccgacgcggacaagggcgcgcacgggatcaccgcgttcatcgtcgagcgcgactggaaaggcttcagtcgcgggccgaagctggacaagctgggcatgcgcggctcgaacacctgcgaactgatcttccaggacgtcgaggtacccgaggagaacgtcctcggcgcggtcaacggcggggtcaaggtactgatgagcggcctcgactacgagcgcgtggtgctttccggcggcccggtgggaatcatgcaggcgtgcatggacgtggtggtgccgtacatccatgaccgccgccagttcggccagagcatcggcgaattccagctggtccagggcaaggtggccgacatgtacaccgccctcaacgccagccgcgcctacctgtacgccgtggccgccgcctgcgaccgcggcgagacgacccgcaaggacgccgctggggtgatcctctacagcgccgagcgcgccacccagatggccctggacgcgatccagatcctcggcggcaacggctacatcaacgagtttcccaccggccgcctgttgcgcgacgccaagctctacgagatcggcgccggcaccagcgagatccgccgcatgctgatcggccgcgagctgttcaacgaaacccgctgaagcctcgctcttcccggcccttttccgccagggagagggcattccattgcatcgacaggcgcatcgccaggtcgggagcgggcgccaaccgcttccgcccacctcgacacggagccaccgccatggccatcctgcacacccagatcaatccacgctccgccgagttcgcggccaacgccgcgaccatgctggaacaggtcaacgccctgcgcaccctcctcggccgcatccacgaaggcggcggtagcgccgcccaggcccggcacagcgcgcgcggcaagctgctggtgcgcgaacgcatcaaccgcctgctcgaccccggctcgccgttcctcgagctttccgccctcgccgcccacgaagtctacggcgaagaggtcgccgccgccggcatcgtcgccgggatcggccgggtcgaaggggtggaatgcatgatcgtcggcaacgatgccacggtgaagggcggcacctactatccgctgaccgtgaagaagcacctgcgggcccaggccatcgccctggagaaccgcctgccatgcatctacctggtggactctggcggcgccaacctgccgcgccaggacgaggtcttccccgaccgcgagcacttcggccggatcttcttcaaccaggccaacatgagtgcccgcggcatcccgcagatcgccgtggtcatgggctcctgcaccgccggcggggcctacgtgccggcgatgtccgacgaaaccgtgatggtgcgcgaacaggccaccatcttcctcgccgggccgccgctggtgaaggccgctaccggcgaggtggtcagcgccgaggaacttggcggcgccgacgtgcactgcaaggtctcaggggtcgccgaccactatgccgaggacgatgaccatgccctggccatcgcccgccgctgcgtcgccaacctcaactggcgcaagcagggccagctgcaatgccgtgcaccgcgcgcgccgctgtaccccgccgaggagctgtacggggtgattcccgccgacagcaagcagccctacgacgtgcgcgaagtgatcgcacggctggtggacggctccgagttcgacgaattcaaggcgctgttcggcaccaccctggtctgcggcttcgcccacctgcacggctatccgatcgccatcctggccaacaacgggatcctcttcgccgaggccgcgcagaaaggcgcgcacttcatcgagttggcctgccagcgtggcatcccgctgctgttcctgcagaacatcaccggtttcatggtcggccagaagtacgaggctggcggcatcgccaagcacggcgccaagctggtgaccgcggtggcctgcgcgcgggtgccgaagttcaccgtgctgatcggcggcagcttcggcgccggcaactacggcatgtgcggacgcgcctacgacccgcgcttcctgtggatgtggccgaacgcgaggatcggcgtgatgggcggcgaacaggccgccggggtgctcgcccaggtcaagcgcgagcaggccgagcgcgccggccagcagctcggcgtcgaagaggaggcgaagatcaaggcgccgatcctcgagcagtacgagcaccagggccatccctactactccagcgcgcgactgtgggacgacggcgtgatcgatccggcgcagacccgcgaggtgctcgccctggcgctttccgccgccctcaacgcccccatcgagccgaccgccttcggcgtgttccgcatgtgacgagcagaccagcatgagcgaattccagaccatccagcttgagatcgacccgcgcggcgtagccaccctgtggctggaccgggcggaaaagaacaacgccttcaatgccgtcgtgatcgacgaactgttgcaggccatcgatcgcgtcggcagcgacccgcaggtccgcctgctggtgctgcgcggccgtggccggcacttctgcggcggtgccgacctggcctggatgcagcagtcggtggacctcgactaccagggcaacctggccgacgcccagcgcatcgccgaactcatgacccatctctacaacctgcccaagccgaccctggcggtggtccagggcgcggtgttcggcggcggggtcggcctggtcagttgctgcgatatggccatcggcagcgacgacgcgaccttctgcctgtccgaggtacgcatcggcctgatcccggcgaccatcgccccgttcgtggtcaaggccatcggccagcgcgccgcgcggcgctattcgctgaccgccgagcgcttcgacggacgccgcgccagcgaactgggcctgctcagcgaaagctgtcccgccgccgaactggaaagccaggccgaggcctggatcgccaacctgctgcaaaacagcccgcgcgccctggtcgcctgcaaggcgctctaccatgaggtcgaggccgccgagctgagcccggcgctgcgccgctacaccgaggcggccatcgcccgcatccgcatcagcccggaaggccaggaaggcctgtgcgccttcctggagaaacgcacgcccgcctggagaaacgacgcatgaacccggactaccgcagcatccagcgcctcctggtcgccaaccgcggcgagatcgcctgccgggtgatgcgcagcgcgcgcgccctcggcatcggcagcgtcgccgtgcacagcgacatcgaccgccacgcccgccacgtcgccgaagccgacatcgccgtcgacctgggcggcgccaagcccgtcgacagctacctgcgcggcgacaggatcatcgccgccgccctcgccagcggcgcccaggcgatccaccccggctacggcttcctctcggagaacgccgacttcgcccgcgcctgcgaggaagccggcctgctcttcctcggaccgccggcggcggccatcgacgccatgggcagcaagtcggccgccaaggcgctgatggaagaagccggcgtgccgctggtgcccggctatcacggcgaagcccaggacctcgagactttccgccgggaagtcgggcgcatcggctacccggtgctgctcaaggccgccgctggcggcggcggcaagggcatgaaggtggtggagcgcgaggccgagctggccgaggccctttcctccgcccagcgcgaggccaaggccgccttcggcgacgcgcggatgctggtggagaaatacctgctgaagccgcgccacgtggagatccaggtattcgccgaccgccatggccactgcctgtacctcaacgaacgcgactgttcgatccagcgccgccaccagaaggtcgtcgaggaagcccccgcccccggtctcggtgcggaactgcgccgggccatgggcgaggccgcggtacgcgcggcgcaggcgatcggctacctcggcgccggtaccgtcgaattcctcctcgacgaacgcggccagttcttcttcatggaaatgaacacccgcctgcaggtggaacacccggtcaccgaggccatcaccggcctcgacctggtcgcctggcagatccgcgtcgctcgcggcgaggcgctgccgctgacacaggaacaggtgccgctgaacggccacgccatcgaagtgcggctctacgcggaagaccccgagggcggcttcctccccgccagcggccgcctggcgctgtaccgcgaagcgcccgccggccccggccggcgggtcgacagcggggtacgcgaaggcgacgaggtctcgccgttctacgacccgatgctggccaagctgatcgcctggggcgaaacccgcgaggaagcccgccagcgcctgctgacgatgctggcggaaacctcggtcggcggcctgcgcaccaacctggcgttcctccgccgcatcctcggccatccggcgttcgccgccgccgaactggacaccgggttcatcgcgcgccaccaagacgacctgctgccggcgccgcaagcgctgccggagcatttctggcaagccgccgccgaagcctggctgcagagcgaaccgggccaccgtcgcgacgacgacccgcattcgccgtggagccgcaacgacggctggcgcagcgccctggcgcgggaggccgacctgatgctgcgctgccgcgacgaacgccgctgcgtccgcctgcgccacgccagccccagccagtatcgcctggacggcgacgacctggtcagccgggtggacggtgtcacccgtcgctcggcggcgttgcgccgcggacgccagttgttcctcgaatgggagggcgaactgctggccatcgaagccgtcgacccgatcgccgaggccgaggccgcccatgcccaccagggtggtttgagcgcgccgatgaacggcagtatcgtgcgggtcctggtcgagcccggccagacggtcgaagccggcaccgccctggtggtgctggaggcgatgaagatggaacacagcatccgcgcgccccacgccggggtagtgaaggcgctgtattgcagcgagggcgaactggtagaggaaggcacgccgctggtggagctggacgagaaccaggcctgacagccaagacgaggaacagcatgaacctgccgaagaaggtccgcctggtggaagtcggtccgcgcgacggactgcagaacgagaaacagccgatcgaggtggccgacaagatccgcctggtcgatgacctgagcgccgccggcctggactacatcgaagtgggcagcttcgtctcgcccaagtgggtgccgcagatggccggctcggccgaggtgttcgccggcatccgccagcgtcccggcgtgacctacgcggcgctggcgccgaacctgaaaggcttcgaggcggcgctggagtcgggggtgaaggaagtggcggtgttcgccgccgcgtcggaagccttctcccagcgcaacatcaactgctcgatcaaggacagcctggagcgcttcgtaccggtgctggaggcggcgcgccagcaccaggtgcgggtgcgcggctacatttcctgcgtgctcggctgtccctacgacggcgatgtcgatccgcgccaggtcgcctgggtcgcccgcgaactccagcagatgggctgctacgaagtgtccctgggcgacaccatcggcgtcggcaccgccggtgccacccgccggctgatcgaggcggtggccagcgaggttccccgcgagcgcctcgccgggcacttccacgacacctacgggcaggccctggcgaacatctacgccagcctgctggaaggcgtcgcggtattcgacagctcggtggccggcctcggcggttgtccctacgccaagggcgccaccggcaacgtcgccagcgaagacgtcctctacctgctgaacggcctggagatccataccggggtcgacatgcacgccctggtcgacgccggccagcgcatctgcgcggtgctcggcaagagcaacggatcgcgagcggcgaaggcgttgctggccaaggcctgagaagcggcggataaccgcgggcggttatccgccctacctgacatcaccctcaggctcggagactgcatcatccaccctgggtgccgtcataccccatccgccaactgatagcccgagtcgtcgcaagcagccgttccgccgccggcccctgctcctcggcctggaagatgctcgccgggccgaccaccgtgagcaccgccgccacccgcccgcgggcgtcgaacaccggtgccgagagcgcctccaccccaggcatcagcagcccatggatcgcatgcaggccgcgcgcgcggatgccctccaggagcaccgcgtaggccgccgggtcggccagcggatggtcggcgcgcccggccaactcttcctcgcgcagctcggccacctcgcgttccggcaggaacgcggcgaacaccaggccggtggacgaaccgagcagcggcagcaccgagccgacctgggtgaccaccgtcaccgcgcgcaccgcctgttccacctgtaccacggtggcgccacggttgccccagacggcgaggaagcaggtctcgttgagcacgtcgcgcagctcggccagcggcgcggcggcgctcttcagcacgtccatgctgtccagcgccgccaggcccacgcgcagggcctcgcgccccagcgagtaatgattggtggaggcgtcctggaccgcgaagccgctggcgatcaatgcctgcaggtagcgatggaccttgctcgccggcatccccacatgctccgccaggcgcgacagcgaggtcgccggggagagttcggcgagggccttgaggatatcggtaccgacttcggcggagcggaccttctgcttgccggaggtttcggcgggactgctgttcttttccatggacgcgggttcctgcgggcggggccgacgttatagcttgacgctgccttccactcaaattacgttatgcgtaattaaattacgataaaaataacgcagccagcgtgccaggtccccggcggatcggcggcaagctgcccccactccccggaggcctcagatgaacctcgactccactgccctcgcctatcaatcgggcttcggcaacgaattcagcagcgaagcgctccccggcgccctgccggtcggccagaactccccgcagaaagcgccctacggcctgtacgccgaactgctctccggcaccgccttcaccatggctcgcagcgaggcccggcgcacctggctgtaccgcatcacgccgtcggccaagcatccgccgttccgccgcctggaacgacagatcgccggtgccgaactggatgcgccgactcccaaccgcctgcgctgggacccgctggcactgcccgagcagcccaccgacttcctcgacggcctgctgcgcatggccgccaacgcgcccggcgacaagcccgccggcgtgagcatctaccagtacctggccaaccgctcgatggagcgttgcttctacgacgccgacggcgaactgctgctggtcccgcaattgggccgtctgcgcctgtgcaccgaactcggcgcgctgcaagtcgaaccgctggagatcgcggtgatcccgcgcgggatgaagttccgcgtcgagctgctcgacggcgaggcacgcggctatatcgccgagaaccacggcgcgccgctgcgcctgcccgacctcggcccgatcggcagcaatggcctggccaatccgcgcgacttcctgaccccggtggcgcgctacgaggacagccgccagccgctgcaactggtgcagaaatacctcggcgagctgtgggcctgcgagcttgaccactcgccgctggacgtggtcgcctggcacggcaacaacgtgccctacaagtacgacctgcgccgcttcaacaccatcggcacggtcagcttcgaccacccggacccgtcgatcttcaccgtgctgacctcccccaccagcgtccccggcctggccaacatcgacttcgtgatcttcccgccgcgctggatggtggccgagaacaccttccgtccgccatggttccaccgcaacctgatgaacgaattcatgggcctgatccagggcgcctatgacgccaaggccggcggcttcgtgcccggcggcgcctcgctgcacagttgcatgagcgcccacggcccggacgcggaaagctgcgacaaggccatcgccgccgacctcaagccgcacaggatcgaccagaccatggccttcatgttcgagaccagccaggtcctccggccgagccgtgccgccctcgagacgccggccctgcagaatgactacgatgcctgctgggcgtcgctcgtatccaccttcaacccgcaacggagataaccccatgaaccagccaacccccactcgtagctgggtcgcctccgccaatgggcatgccgacttccccctgcagaacctgccgctgggcatcttcagccgtgccggcctgagcccgcgttgcggcgtggccatcggcgactcgatcctcgacctggacgcggcgctggccgccgggctgttcgagggtgccgccggcgaagccgccgaagccacccgcggcggcgcgctgaacgccttcttcgccctcggcaagccggcccgcgtggcgctgcgccagcgcctgctggagctgctcggcgaaggcgccgcggagcgcccggaactgctccatccggccgccgagtgccaaatgcacctaccggccaggatcggcgactacaccgacttctacgtcggcatccgccatgccgagaacgtcggcaagctgttccgcccggacaacccactgctgcccaactacaagcacgtgcccatcggctaccacggccgcgcctcgaccgtgcgcgtctccggcagcgaagtgcgccggcccaacggccagaccctgccggccggcgccagcgagccggtgttcggcccctgcgcgcgcctggactacgaactggagctgggcatctggatcggccagggcaacgccctcggcgaagccatcccggtttcccgcgccgccgagcacatcgccggcttctgcctgctcaacgactggtcggcgcgcgacatccaggcctgggaataccaaccgctcggcccgttcctgtcgaagagcttcattaccagcgtctcgccctgggtggtcaccgccgaagccctggagccgttccgccgtgcccagccagcgcgccccgaaggcgacccgtggccgctgccgtatctctacgacgacaacgaccaggcccacggcgccttcgacatcgagctggaggtcctgctgctcaccgagggcctgcgcgagaaaggcctgccgccgcagcgcctgaccctgagcaacagcctgagcatgtactggacggtggcgcagatggtcgcccaccacagcgtcaatggctgccagttgcagcccggcgacctgttcggctccggcaccctgtccggcgccgagcccggccagttcggctcgctgctggagatcaccgctggcggcaagcagccggtgcaactggcctccggcgagacccggcgcttcctcgaggacggcgacgaggtcatcctccgcgctcgctgcaagcgcgagggacatgtctcgatcggtttcggcgaatgtcgcggcaaggtgctcgcggcccttccgggggcgcgcggatgaagctctatacctactaccgttccacctcctcctaccgggtgcgcatcgccctggcgctgaaggggctggactaccagtcgctgccggtcaacctggtccgcgacggcggcgaacaccgccaacccgcctacctggcgctcaacccgcagggccgcgtaccggccctgcaggtcgacgagggcgagctgctgatccagtcgccggcgatcatcgagtacctcgaggagcgctacccgcaacccgccctgctctccagcgatccgctgcgccgcgcccgcgagcgcggagtcgcggcgctggtcggctgcgacatccacccgttgcacaacgccagcgtgctcaacctgctgcgtcagtggggccacgacgaagagcaggtccggcagtggatcggccactgggtcggccagggtctcgccgccgtcgagcaactgatcggcgaccagggctggtgcttcggcgaccggccgggcctggccgacgtctacctggtcccgcagctctacgccgccgagcgcttcggcgtggcgctggacgcctggccacggatccgccgggtcgccgacctggccgccgcccatccggcgttccgccaggcccatccggccaaccagccggacaccccggccgcctgagggaccgcagagtcccgctcctgaagataaaggggggcgtccgccggacgccccatcaccaataagaacctcaggtaccttgcgatgcacaaccagatcgccagctttcgcgcggcgctcgacgcgcgccccgtgtcccgctaccagtggctgttgctgctgctcctcgccctgttgctggtcaccgatggctacgatgcccaggtgctcggctacgtggtgccgaccctggcccaggaatggggcctggacaaggccgcgttcggcccggtgttcagcgccaacctgttcggcctgaccgtcggttcgctgctggtgacgccgctggcggaccgcttcggcatccgccgggtgctgctttgctgcgtgctgatctacgccagcctgaccgtcctgatggtcttcgccggttccctggaaagcctgatgctggcgcgcttcgtctgcggcatcggaatgggcggggcgatgcccagtgccatggcgctgatggccgagtattcgccaccgcgcctgcgtaccctgatggtcaccctggcggcctgcggtttctccttcggcggcgccgccggcggtttcgtcgccgccgccttcatggacggcttcggctggcaggcggtgttcctcgccggcggcgtcaccccgttgctgctgttccccttcctcctcctgttcctcccggagtcgctgccgcgcctgctccgcgacgcaccgccctatgcccgcctgcgccagctcagcgagcgtatggcgccgggctggcagccgccgccggcacaggccgacgccgagccggcggcaagcctgaccgtgctggagctgttccgccacggttacgcgcggccgaccctgctgctctgggcgaccttcttcgtcagcctgatcctgctctacttcatggtcagctggctgccctcgctgctccaggaaagcggcctgacacgcaatgcggcgaacctggcgacctcgatgttcctcttcgccggcaccctcggcgcgatgctcctggcctggctcgccgaccgcctgcgcagcaaggtccgcctgctggcggcgattctcgccggcgccgcgctgttcaccctgctcctcggcctcaaccacgaccagccgcgctggctgctggcgttcgtcttcgccgccggcttctgcatcatcggcgggcagttgaccctgaacgccttcgccagcaacttctacccggcccaggtacgcgccaccggcaccggctgggcgctgggcgtgggccgcttcggttcgatcctcggcccactgttcggcagcctgctgctgggcatgcacatatccgtggagaacatcttcatgcttgcggcgattcccgccgggctcgccgcgctactgatcctccaggtccgctcgcccgccgcccaggcgcagcgggaaagcgccgccgcgctggccgtcgaggaatcctgagccttcaccgcgagcggcttcccggctacagtggcgggccgtttcgccgtccgccgcaggagccgccgatgaacgacgccgacagcctccaggattaccaacgcgtgcgccagcaggcgatccgttcgctgttcgagatcgtcgaaggctccagcgaaggcacggtgatcgtcgaccgcgaggcccgcatcgtctggatcaaccagcgctacgcccagcgtttcggcctcgccgacccggcgcaggccatcggccggccctgcgaaagcgtgatccccggtagcctgctgcgcgaagtggtaggcagcggcaagccgatcctgctggacatgatggacagcgcgaaggacccgctggtggtgatgcgcctgccgatccacgacgacgccggcgaagtgatcggcgccatcggcttcgccctgctcgacgaactgcgttcgctgtcgccgctggtgacccgctacctgagcatgcagcgcgaactggcctcgacccgctcgcaattgcaggcgcgccaggccaagtacagcttcagccacttcgtcggcaccagtccggccagcctggaagtcaagcgccgcgcccgtcgtggcgcggccagcgaagcgccggtgctgttgctcggcgagaccggcaccggcaaggaactgctcgcccacgccatccacagcgcttcgccgcgggcgcacaaggccttcgtcagcgtgaacgccgcggcgatcccggaaagcctgctggaggccgaattcttcggtaccgccccgggggccttcaccggtgccgagcgcaagggccggccaggcaagttgcaggtggcccagggcggcacgttgttcctcgacgagatcggcgacatgccgctggccttgcaaggtaagctgttgcgcgtgctacaggagaaagagttcgaagcggtgggttccaacgaagtgatccgcagcgacatccgcctggtcgccgccacttccatcgacctgcagcaggcgatgcgcgaaggccgtttccgcgctgacctctactaccggctgaacgtcctgccgatcgagatcccgccgttgcgccagcgcctggacgacctcccggcgctctgcgagtcgatcctcgacagcctcgaccacggccgtctccacgaactcggcggcgacgccctggcgctgctcgcccggcatgcctggccgggcaacgtccgcgaactgcgcaacgtgctggaacgcgcgctgctgctggccgaccaacggttgctggacgccgccgccctcggcgcggcgctggggcccctgcaaccgctgccggagctgcctcgagcggcggacgacaggccggtcggggatttccaacaggcccgcgaagccttcgagcgcgacctgatcggacgggccctggcgcagagtgccggcaatgtggtggaagcggcgaaacgcctgggcctgggtcgctcgaccctgtacaagaagatcgtggcgctgggcattcgtctcgacagcgggactcgtctcgaaatagagacgaactgagacctgcatagccactgaactttcgctcgattacgtctccattttgagacaacgctattccccacgctccccttcgtctcgccgcagcccgcgaaaaccgcgattctggggcctggcacggttatcgcaacgtgcctttccgacggccctgccccgttccaggccgtcacgccggtgcccgcaccgttcgacaacaagaaacaggcccggagcgccttccccatgcgaagcgcgccccgcagcgccgtggagatatgcccgatgagcgtgatcatcgcccttgccgccctgggcctgctgatgctggccgcctaccggggctacagcgtcatcctgttcgcccccctcgccgccctcggcgccgtcctgctcaccgatcccagcgcggtcgcgccgaccttcaccggggtgttcatggagaagatggtcggtttcatcaagctttacttcccggtattcctgcttggcgcggtgttcggcaagctgatcgagctggccggcttctcccgttccatcgtcgcggcggcgatccgcctgctcggcacccgccaggcgatgctggtgatcgtactggtctgcgcgctgctcacctacggcggcgtctcgctgttcgtggtggtgttcgcggtctacccgttcgccgcggagatgttccgccagagcgacatccccaagcggttgattccggcgaccatcgccctcggcgcgttttccttcaccatggacgcgctgcccggcaccccgcagatccagaacatcatcccctcgaccttcttcggcacccacgcctgggccgcgccctggctcggcaccctcggcgcgctgttcgtcttcgccgtgggcatgctctacctgcgacgccaggcgaacaaggcgcggcgcaacggcgaaggctacggcagcgacctgcgcaacgagccggagaccgccgatgacctgcgcctgccgaatccctggctggcgctctcgccgctggtgctggtcggggtcgccaacctgctgttcacccactggatcccgcaatggtacggccaggtccataccctgcaactggccggcatggccacgccgttgcaaaccgaggtcggcaagctcaccgcgatctgggcagtgcaggcggccctgctgctgggcatcctgctggtgctggcgagcggcttcgcggcgatccgcagccgcctcgccgaaggcacccgcagcgcggtggccggctcgctgctggcggcgatgaacaccgcctcggaatacggcttcggtgcggtgatcgcctcgctgccgggcttcctggtgctggccgacgcgctcaagagcattcccaatccgctggtcaacgaagcgatcaccgtcaccctgctggctggcatcaccggttccgcgtcgggcggcatgagcatcgccctggcggcgatgtccgataccttcatcgccgccgccaacgccgcgcagatccccctggaagtcctccaccgggtcgccgccatggccagcggcgggatggataccctgccgcacaacggcgcggtgatcaccctcctggcggtcaccggcctgacccatcgggaggcgtacaaggacattttcggtattaccctgatcaagaccctggcggtgttcttcgtcatcgggctgttctacgccaccggcctggtctgatccgcccttttttcatccagcgggagaaacagcatgaccctgaaaggcaagaccgccctggtcaccggttccaccagcggcatcggcctgggcatcgccctgagcctggccgaggccggcgccgacctgctcctcaacggcttcggcgaggtcgacgcggcactggcgcaggtccgcgcccgcggcgtgcgcgcagagcaccacccggccgacctctccagcccggagcagatcggcgaactgatggccttcgccgagcggaccttcggcggcgtcgacatcctcgtcaacaacgccggcatccagtacgtggcgccggtgcaggaattccccacggaacgctgggacgcgatcatcgcgatcaacctgtcctcagtgttccataccacccgcctggccctgccgggcatgctcgcgcgcggctgggggcggatcgtcaacatcgcctcgacccacggcctggtcgcctcggccgggaagagcgcctacgtcgccgccaagcatggcgtgctcggcctgaccaagagtgtggcgctggaaacggcgcgcacgccggtgacctgcaacgccatctgccccggctgggtgctgaccccgttggtgcagaagcagatcgacgcgcgcaccgccgagggcgtctcgcccgaacaggcggaacatgacctgctggcggaaaagcaaccctcgctggccttcgtcacccccgagcaactcggcggactgacgctgttcctttgcagcgaagccgccgaccaggtgcgcggcgcggcctggaacatggatggcggctgggtggcgcagtagccggggcggccagcctctccccagaccctctccctgaagggagagggaaccatccggagttcgcccgccccattgcgtagggcggataacgccacaggcgttatccgccgatacctcgtttcccggcgcggctaccctctccccaaccttctcccttcagggagaggaagttatcggggccaggtcggtccgccgatgcgctacggcatcaccggcgggatgtacgccagggtgctgcccagggcccagagcagcaccagcaccagcgggatgtgcaccagcaactggacgaacgagaagccgatcaggtcgcgcgccttcagccccagcacgccgagcaacggcagcatgtagaacgggttgatcaggttcggcagcgcctcggcggcgttgtagatctgcaccgcccagccgaggtggtattgcagctcgttggccacctgcatcacgtacggcgcctcgatgatccacttgccgccgccggagggaatgaagaagcccagcaccgccgagtacacgcccatcagcagcgcgtaggtgtcgtgggaggcgatctgtacgaagaaggtcgagatatggtgggccagggtctcgccgtcgctgccgttgaccgtggtcatgatcgccgcgatcgagccgtacagcgggaactggatcagcaccccggtggtggtcggcaccgcgcgcgccaccgcgtcgaggaagctgcgcgggcgccagtgcagcaacgcgccgagcatcaggaacagcaggttataggtgttcaacccggagatcgccaggatcgccggcttggtcgagaactcgtggaccagccagccgccggccagcagtaccagcaggatgatcagcaacgggctgtgctccagccactcgccgggccgggtcggcgccagcctggccggagcggtgaagctcacgtcgaccccgcaatccttggcgtcgcgggcgctggcggcgctcggcgcggtcatgtaggcgatcaccagcgagaccaggatcagcgccagcagcatgaccccggactgccagaggaagatggtctcggtgaaggggatcaccccggtgatcgccaggatcgacggtggcaggctggccgggttggcctgcaactgcgcggccgacgacgacaggcccagcgcccacaccgcgcccagcccgaggtaggccgcggcgccggcggcgcggtagtccatgcgcaggtcgctgcggcgcgccagggcgcgtaccagcaggccgccgaagaccaggctgaggccccagttgagcagcgaggcgagcatcgacaccagcgccacccagcagaccgccgagcggccattcttcggcacccgcgcgagcaggtcgatgagacgcgaggcggggcctgaactggccaccacatagccgccgatgaccacgaaggccatctgcatggtgaacgggatcaggctccagaaaccgtcgccgaaggctttcgccgtggcggtcggtccggcgcccatggccagcgcggccaggctgacgatgaggatggccagggcggcgaacacccaggagtcgggaaaccagcgctcggcccagttcgagcaacgcatggcgaagcgcgcggagcggctttcttggatgggaaggatagcggtcatcgcggattctctcggttttattgttattcggcgactacggggccgcctgtgtgtgctacggctccctgggcacccggccgtcccgaggggcggaacggtacggggccggtcggacggtcaaggccgtccgccgctcgttccctggacacgagcgcgccatgcccccgcgaaaggacatggcgcgatcacgccgcgagcggcaggtcgatggatcagtcgcgggccagggtcagggcgacgccctgcccgccgccgatgcacagggtggcgaggcccttcttcgcgtcgcgacggatcatctcgtgcagcagggtcaccagcacccggcagccggacgcgccgatcgggtggccaagggcgatggcgccgccgttgacgttgaccctggcggcatcccagcccagttcccgacccaccgccagggactgcgcggcgaaggcctcgttggcctcgatcaggtccagttgctccaggctccagccggccttgtcgagcgcgcgacgggtggcggagaccgggccgatgcccatgatcgccgggtcgaccccggcgctggcgtagctggcgatccgcgccagcaccggcaggcccagggccttggccttggctgcgctcatcagcaataccgcggcggcgccgtcgttgaggctggaggcgttgccggcggtgacgctgccgtccttcctgaaggccggcttgagcttggccagggcctcgacggtggtgccggcgcgcggctgctcgtcggtatcgaagctcagcggctcgcccttgcgctgcgggacctggatcggcgtgatctcgtcgcggaagcgcccgccctcgatggcggcgatggccttctgctgcgaagcggcggcgaaggcgtcctgctcctcgcgggtcaggccgtacttctccgccaggttctcggcggtgatgcccatgtggtagtcgttgaaggcgtcccacaggccgtcctcgatcatgctgtcgaccagcttcgcatggcccatgcgcaggccggtgcgggcgccgggcatgacgtagggcgccaggctcatgttctcctggccgccggcgacgatcacctcggcgtcgccgcagcggatcgcctgggcgcctaggtgcagggccttgaggccggagccgcagaccttgttcagggtcatggccggcacgccgaccgacaggccggccttgatcgccgcctggcgcgccgggttctgcccggaaccggcggtgagcacctggccgaggatcacttcgtcgacctggccggcatcgagaccggtctgttcgagcaggcggcggatcaccgcggcgcccagctcgggggcgggaatgccggccagcgagccctggaagctgccgacggcggtacgggtagcggcgacgatgacgacgtcttgcatggatggttctcctggattcgcccgtggccgggccgaatcgctgcgggtggacgtagacggtgcgacagcctcctatcctacgccctctggaaaggacggtccgcgcggccggcgccttgcgtggaggcgccggccgcgcgggccgcgattcagaaactcatttccggcacgtgctcggggacgatcagcttgccggcggtcttcgccacgatctcctcgacgctgaccccgggggcgcgctcgcggaggatgaaggcgccgtcctcgatctccaggtaggccaggtcggtgagcaccttgcgaatgcagccgcaaccggtcagcggcagggtgcagtacggcagcagcttggactcgccgtccttggaggcgtgggtcatggtgacgatgatgttctcggcgccggccaccaggtccatggcgccgcccatgcccttgaccagcttgccggggatcatccaggaggcgatgttgccgcgcacgtccacctcgaaggcaccgagcacggtgaggtcgacgtggccgccacggatcatggcgaaggactgcgccgagtcgaagatcgacgcgccgacgcgggcggtcacggtctgcttgccggcgttgatcatgtcggcgtcgacttccgcctcgctggggaacgcgcccatgccgagcaggccgttctccgactggagcatgacgtcgatgccttccggcacgtagttggccaccagggtcgggatgccgatgccgaggttgacgtagtagccgtccttcaattcgcgcgccacgcgctgcgccatctgttcgcgggtaagtgccatctggggaaacctcttgtcgttgtagcggccgccgtcaggcgcgcagcgtgcgtttctcgatgcgtttctcgaagcgaccctggatgatccggtcgacgtagatgccgggggtgtggatctgcgtcgggtccagttcgccgggctcgacgatctcctccacctcgaccaccgtgatgcgcccggcggtggcgaccagcgggttgaagttctgcgcggtgtggcgatagacgacgttgccgaaatggtcggccttccagcccttgacgatggcgaagtcgccggtgatggccggttcgaggatgtagtggcggccattgaactcgcgcgcctccttgccctcggcgaccggggtgccgtagccggtggcggtgaagaaggccgggatgccggcgccgccggcgcggatcttctcggccagcgagccttgcggggtcagttcgacttccagctcgccactgagcagttgttgctcgaacagggcgttctcgccgacataggaggcgatcatcttgcggatctgccggtcttccagcagcacgccgaggccgaaaccgtcgacgccgcagttgttcgagaccaccgtgaggtccctgaccccgcgccggcggatttccgcgatcaggttctcgggaatcccgcagaggccgaagcccccggcgaggacggtcatgccgtcggtcaggccttcgagggcctcttcgtaactgcctactcgcttgtcgagtccgctcatgctgctgtgcctcttccggctcttgtgattgtgcgtgcggcagtctgactgccgggtcgcacagagcttctccgctgcggactgatttgttaagtttgtttttccaatccattgatgagaaaaacaaataaatgaccgtcaagcagttgcgcgccttcctcgccgtggcgcagagcctcagcttcgcccaggccggcgaacgcctgcacctctcccagccggccctgagcctggcgatcaagagcctggaggaaagcctcggcggtccgctgctggaacgtaccacccgcagcgtcagcctcacccccgagggcgagaccctgctgccgctggcgctacgcctgctggccgactgggacaataccgaggaattgctgcgccagcacttcaccctgcaactgggcaaggtctccatcgccgccatgccctccttcgccggcaacctgctgccgctggtcttgaagacctttcgcgaacgccacccgcgggtcaacgtggcggtgcacgacgtgatcaacgagcaggtgctggagatggtccgcaaccgacgcgtcgagctgggcatcgccttcgagccggagtccctggaaaacctcgagttcaccccgttctacagcgaccgcttcgtcgccgtggtgccggccggctcgccgctgtccgggcaggagcgggtcagttggcgcgaactgctcggcgagcccttcatcaccctgcaacgcccctcggcggtgcgcctgctcctggaagaaagcgtggccgccgagcacggtcgcttgccggtggcgttcgagagccaccaactggtcacggtcgggcggatggtcgcccagagactcggtgtcagcgccgtgccgaccctgtgcatccagcagatgcaggaactcggcgcgcgctgcctgccgctctacgcgccgcaggtgcagcggcgggtcggcctgctgcggctgagcgagcacaagctgtccaccgccgcccaggccctcagcgacgtgctgctgcatggcaccgactggcgctcgctggcgctgccgcaggaccagtccacggagtgaggcaggcagcggcgggtccggttatgcttcctgcatgtcccggaacaacaacaaggacggacacgccatgcccgcaccgctctggagcccttccgccgaacgcatcgccgccagtcgcatggaggccttccgacgcttcgtcaaccagcggcacgccctcggcctggtcgactacccggcgctgcatgcctggagcgtgcagcggcgcgaggcgttctggcaggccatcgtcgacttcttcgaggtgcgcttccagcaaccgccgcgtgcggtcctcgaggaaggcgcgcagatgccctcggcgcgctggttccccggcgccacgctgaatttcgccgaacacctgctgcgccgccgcgatgatgccccggcgctgatcgcggtgagcgaagacggtcgccgcgaggtgctcagccacgccgaactggcccgtcacgtggcgggcctgcagaagcgcctcgccgccctgggcataggccccggcgaccgggtcgccgcgctgatgccgaacacctggcagaccgtggtcggcatgctcgccaccgccagcctcggcgcgacctggtcgagctgctcgccggacttcggtacccagggcgtgatcgaccgcttcggccagatcgaaccgcgcgtgctgatcgcctgtgccggctaccgctacgccggcaagtcgctggacctgaccgccaagctcaacgaggtgctcgccggcctgcccggcctggagcaactgctggtggtgccctacgaccgtccgcaggcgcagccgcaggactaccgctgccaggcgcaggtcgcgctgtgggacgggttctaccaggccgagggcgagccggtcttcaccccggtgcccttcgagcagccgctgtacatcctctattcgtcgggcaccaccggagtccccaagtgcatcgtccatgccaccggcggcgtgctcctgcaacatctcaaggagcacggcctgcacaccgacctgggcgacggcgaccggctgttctactacaccacctgcggctggatgatgtggaactggctggcctccggtctggcggtgggcgccagcctggtgctctacgacggctcgccgttccaccccggccccgagcgcctgctggacctcatcgacgccgaggacatcgccgtgttcggcgccagcgccaagtacctggcggcgctcgagaaggccggcatgcgcccgcgccacagccaccgcctggacagcctgaggacactgctctccaccggttcgccgctggcccacgaaagcttcgactacgtctaccgcgagctgaagagcgacctctgcctgtcgtcgatctccggcggcaccgacatcgtttcctgcttcgccatcggcaacccggtgctgccggtgtggcgcggcgaactgcaatgcaaggcgctgggcatggccgtggaaatctgggacgacgacggccgccgcctcgccagcggcaagggcgagctggtctgcacccggcatttcccgtcgatcccactgggcttctggaacgacccggatggcaccaggttccacgacgcctacttcgccagctttcccggcgtctgggcccatggcgactacgccgaggaaaccgcccacggcgggctggtcatccacggccgctccgacgcggtgctcaatcccggcggcgtgcgcatcggcaccgcggaaatctaccgccaggtggaaaaggtcgaggaagtcctcgagtccatcgccatcggccaggactggcagggcgatgtgcgtgtgctgctgttcgtccgcctgcgcgacggcgtgcgactcgacgagccgctgcgcgaacgcatccgccagaccatccgcgccaacgccacgccgcgccacgtaccggcgaagatcatccaggtcgccgatatcccgcgcaccctgagcggcaagatcgtcgagcttgcggtgcgcaacgtgatccacggccgcccggtgaagaacaccgacgccctggccaacccgcaggcgctggagctttatcgcgacctcgccgaactgcgcgactgaagccgcggcgagcctgggctagaatgcgcgttccgtcctaccgcaaaaggtaattccatgcccgtcgccatggcccgccacatcctggtcaagaccgcagccgaggccgcgcaactgaagcagcgcctggccaagggcgaggacttcgccacgctggcgaagaagcattcgacctgcccgtccggcaagcgcggcggcgacctcggcgaggtgcgcccggggcagatggtcaggtccatcgacaatgccatcttcaggaaacccgtgggcgtgctccagggtccgctgaagagccagttcggctaccatctcctggaagtgtatttccgcgactgaaccgccaccggagcgtccatgaccgccgaccagatcgccgccttctgcctgcaactgcccggcgcccgggaagacctcaagtggggttcgaaccgggtgttctcggtggccggcaacaagatgttcgccatcctcgacttcgtcgacaaggacggcggcctggccttcaaggtcggcagcgagctgttcctcggctatgtcgaccgccccggcatccgtccggcgccctacctggcgcgcgcgcactggatcgtcatggcccgcccctacccgatgaaggcggcggagttgcgcgaggccctggtccgttcccatcagttggtggtggcgcgcctgcccaagcgccagcgcctcggcctggtactcgacgcatgagtcgcgaccgtctgtacacctgggccggcctgtggcgctcgccgtcgtccagctgggaggccctgcgcctggaggacgaccaggcggaaagccagttgcgcgcgccggacgaacgcagcggcctgccctaccaattggactaccggctgcgctgggacgccgactggcatctgcgtgaggcggtgttccacgtcgaaagcgaaaccggggtgcgcaagctgcacctgctcgccgatggccgcggccactggcaggacggcgacggcgaagcgctaccggcattcgacggttgcctggacatcgatatttggccaagccccttcaccaacaccttcccgatccgccgcctgggcctggccgatggccagcgcgcggaaatccgcgcgctctacatcgaggccccggccctggagccgcgtagcatgcgccaggcatacacccgcctggacgccagccactacctctacgagaacctcgaaggcagcgcgttcaaggcggtactgctggtggacgaacagggcctggtgatcgattacccgggtctcttccagcgtctctgaacgcgctagcgccgggcaccgcgcgtcgccgatagcccggcgaatccgttagcctgctttcattcgtcatctgcaacggtcatcatggcggaccgcgacaacccactgcgaccgcgtttcccacatgtccgtcgatatccgccccaccccgccggcgcaggacagcgcccggcaaaacgtcaccctgcagatcgtctcggtggtgatgttcaccttcatcggctacctgaccatcggcatcccgctggcggtgctgcccggctacgtgcacgacgacctcggctacggctcggtgctggccggcctggtgatcagcctgcagtacctcgccaccctgctcgcccggccctacgccgggcgcgtcatcgacggcctcgggccgaagcgcgcggtgctctacggcatggccggcagcgccgcgagcgggctgttcatgctgctctcggtggcgatccagggctggccggcgctaagcctggccagcctgctggtcggccgcctggtactcggcgcggcggaaagcctggtcggctcggcggcgatcggctggggcatcggccgggtcggcgcgccgcacaccgccaaggtgatttcctggaacggcatcgccagctacggcgccatcgccctcggggcgccgctaggggtgctgctggtgcagtggctggggctgtggagcatgggcgcgtccatcgtcctgctcggggcgctcggcttcgccctggcctggccgaagttgccggcgccgctggtgcacggcgagcgactgccgttccaccatgtgctcggccgggtcaccccgcacggtatgggcctggcgctgggggcgatcggcttcggcaccatcgccaccttcatcaccctttactacgccagccgtggctgggccaacgcagtgctctgcctgagtgccttcggcggttgcttcatcggcgcccggctgttgttcgccaatagcatcaaccggctcggcggcttccgcgtggcgatcatctgcctcggcgtcgaaagcctcggcctgctgttgctgtggagcgcgccgaatccctgggtcggcctggccggcgcggccctcaccggcttcggcttctccctggtgttcccggcgttcggcgtggaagcggtgaacctggtaccggcttccaaccgtggcgcggcgctgggcgcctactcgctgttcgtcgacctgtcgctgggcatcaccgggccgctggtgggcttcgtcgccaacctgttcggcttccgctcgatgttcctcttcgcctgcctggcctcgctcggcgggctggccctggccgtcgcactgcaccggcgcagccgccggcccggctagggcgtgcaccgtcccaggcggcggtacgcgttctagagctcgccgagcaaggcgctcagggccgcgcgcaacttgccgggcttcagcggcttgttgagcagcggcacgcccaggcgggccagcgcgcggcggcaatcgtcgctgcggtcggcggtgatcatcaccgcggcgatctccgcgccgtagtcctcgcgcaaggcgcccagcaactggcaaccggtagcgccgtggtccaggtggtagtcgaccaggatcgcatccggcgcgcggccatcgagcgccttgcgcgcgccttccaggtcggtggcggtaagcacctcgcagccccactggccgagcagcgcggacatgctgaagagaatctcggtctcgttgtccaccaccagcagccgccgtcccggcagcggatcaccagccgaaacccgcgcaatcgcctcgccgggtgctggccgcgccggcttgcggaccagcggcacctcgatggcgaacagcgagcctcggcctggagtcgaatgcacctcgatgcggtagccgaggatgccggcgatacggtcgacgatggccagcccgagtccgacgccacggcgctcggaagcgcgcccggcgtccagttggttgaactcgaggaagatcgcctgcaactggtcggcggggatgccccggccagtgtcccacacctccaggcgtaccttgccgccacgccggcgcgcccccagcagcacgctgccgcgctcggtgtagcggcaggcgttgctgagcaagttgcgcaggatccgcgacagcaggcgcgcgtcggtgcgcactgccagtcgcgggatccgcgcacgcagggccaggccggcggcacgcgcgacttcctcgaactccgaggccagcggagcgagcagttcgtcgagggaatagtcgcccaggtccggacggatcgcgctctggtcgagccgggcgatttccagcaggtcggtgagcaaggtctcggcaccttccagggccaggtgggtgcgctccaccagttgcagttcggcggccggcaggccccgttcgcgcagggtgtcgaccagcagccgcgccgcgttgagcggttgcagcaggtcgtggctggcggcggcgaggtacttgtccttgctgtggttggcggcttcggcggcgtcgcgcgcctggcgcaactggcggttgagctcttccagctcgtgggtgcgctcggctacccgccgctccagctcctcgttcatggtctgcaggcgctgctgggcctggacccgctcggtgatatcggcgacgaaaccttcgaccaattcttcctcgtcgtgcctgagcagcaggttcatcaatacctcgatgtgactgccgtccctgcgccagaggcgcgtctcgtagccgaacaggccgccgcgctcgcgcagcagcgcgcggatccgtcgcatctcggcctcgccgccgacgaacagttgcccggccatgtcctccagcgaccagagcacctgttgcggatcgtcgtagccgagcatctgcgccagcgccggattggcggcgcgcagcccctggccgaggctggcctggaagatgccgtgcaccgcgtgctcgaacagccatttgtagcggttgcgctcggcctccagctcctccaggcgcgccagcagctccgggtagtggctcttgcgcgcggagtggctgcccaggccgagtaacccggccagggcctcctgctgctgctcagagggcctcgccatagaccacctcgacatcgcgctggctcgactcgcgcgggttggtaaggatgcacgggtcctgcatcgcgtggcgcgagaggaaaggaatgtcggagctgccgaccccgtgcagggcgaggctctcgtggaaacccacggcgtgcttgaaggcgatcaggtggtccaccaggcgctggcggacctgcccctgggtcagaccgcggcaatcgatgccgaaggtctcggcgatcaccttgaagcgttccggcgcggcgctgtagttgaacgccaccacgtgttcgaccagcgccgcgttgcacaggccgtggggcaggtcgagatagccgccgaggctgtgcgacatggcatgcaccgcgccgaggatggcgttggagaaggccagcccggcctgcatgctcccgagcatgatcttctcgcgcagggcgatgtcgccggggttggcgatcatctgtaccagattgccatcgatcaggcgcatcgcttccagcgcgtggggatcggtcagcggcccgtggccggtggagacgaacgcctcgatggcgtgtaccagtgcatcgatgccggtacaggccgaaaggaagggatccatggtcaacgtggtttccgggtcgatcagcgagacgtcaggcacaaccgccttgctcaccacggagaacttcatgcgctcgtcctggttggaaatgatcacgaactgcgagacgtccgccgaagtcccggcggtggtcgggatcaggatcagcggcggactcggcacccgcagccggtcgacgccttcgaactcgaggatgctgcggccatgggcggcgacgatgccgatgcccttggcgcaatccatcgggctgccgccgcccaccgcgacgatcacgttgcagccctcgctgcgatagaactcggcgccgagcatcacctcgtcgacccgggggttgggcgaaacgtcggtatacaggcagtagtcgatgccctgcccctccaggcttgcctggatgtcggcgacccagccggcggcgagcacgccggggtcggagaccagcaggaccttgcgcgcaccgaaggtcttcacgtagttggcgacgctgtgccggcagccggcgccgaagatgatctcgggcgagacgaatttacgcagttggctgaggtcgtggctcatctgacagaccattcttattgttatcggacattgccggcagcctactgcattcgtcggttattgcaatgcgaccttggcggccctttcaatcctccagcaggcccaggtagaagcgccattccgccagcagcgcatgggcgcgattggccggctggcggaaaccgtggcgctcctgcggatagcggtggcactccacgcgcacgccgctgcgccgcagtccggcgaccatcgcctcggtctgctccggcaccaccaccgcgtcgagcccgccctggaagaacactaccggcgcgcggatacgcccgacctgaagcaccgggctgcgcaccaggtagcgacggcgctggcgcagcgggtcgccaatcagccagtcgaggtagtcaccctcgaacttgtgggtgcaacgcgccagtgccaacggatcgctgaccccatagagactggcgccgccgcgcaggccatcgaggcaagccagggcgcgcaacgcgctgtagcctccggcgctggcgccacggacgaagacccgggcgcggtcgatccgtccctccgcgtccagctgcgccagcgcggcctcgatatcgcgcaactccaggcgcccccactggccgcgcaagcgctgccgataggcgcggccgtagccgctgctgccccggtagttcagcgccgccacggcgaaaccgcgctgggtccagaactgcaggccggcatcgaacgccggcgaatgcatcgaggtcggtccgccatgcagccacaccagcagcggcggtggtcgtcggggatcgacgcggcggcgggcattgcgcggcggatagaagaaaccgtggccgttttcgccgttgcccagcccatagacgaaggcctgcggatgcgacaggtcgtcctccgccagcggtcgctcgccgccacgcagcacctcgacacgcagctcgtcgcgatggatcgccagcagcgccggcaggcgcccggccgccgccgcgatgcagtagaacgcccgggcatccgcggccagtccggcgaaccggttccagtccgcggccaggcgccgctcgctgccgtccgcttcgcgcaggaacagttgcccgccgccggcctcgacgcgactgagcagcagccttccctctcccagcggcaggtagctgcaagcgcccaattgccagggcgcgccagcgtggtcggcatcggcgaagcggccggccaacgctacctcggcgcagggacgccaccagccgtcgcggtcgctcagccagtgaaggcggccggcgggatcgaagcgtggttgctggatcgactcgccgcctccggctccggccaggcagcgcgtacgcccattctccgccaggcccaggcgggtctcggtccagggctggtgcggacggtcccattcgatccaggccagccgccgcccctggccggcggcacgcggcgcggcgtagaaatcggcgccctcgaccagcacccggcgcgcgccatcggcgtccaggcgcacgatgcgatgcacgaccccggtcggcccatggctctcttccaccgccagcagggcatcccaggcatcgacgtaggccaggtcgccgtagcgacactgcgccccgccgcccagcacttgggctgcgcggcccgctcgccagcggcgtacctgctggtcggtttcgtcgacccaggccagcccgtcgagcgtcacgcagcaggcgccgccgccgtactcgtagacccggctgcgcaccgagccgtccggcgcggtgggctcctccagcacgccgtcgcgccacaggtacaggcgcgagcgcgcgctggccggatcgaattccacccaggccagcccgccatgggccgccttcagctcgctgaaatcgcgcccggcggccaccgcgcgctcggcgctccagtcgctcggccagtcgccgtagtcgaccattgcctcaggccttgcagatcaggcgtgacgcgcgctggttgcgccaggtcagcgcgtccaggccaagcggcgcctcctcggcctggcgacgggccgcgaggatcaggtcgtgccgtgccgacttggcgcagaccgggtcggtggcgtcggcatcgccggtgaggaggaacgcctggcagcggcagccgccgtggtccctctccttctcctcgcaggaacggcagggttcgggcatccaggcgtcgccgcggtaacggttgaagccgaacgattcgtaccagatgtggcgcaggctgtgctcgcgcacgttgggaaactgcaccggcaattgccgcgcgctgtgacacggcagcgcggtgccgtcgggggtgatgtcgaggaatacgctggcccagccgcccatgcaggccttcggccgttcctcgtagtagtcgggggtgacgaagatcagcttgcacggattgccttcggcggccagccgctggcggtattcggcggtgatccgctcggcgcgctccagttgggcgcgggtcggcagcagcccggcacggttcagcgcggcccagccgtagaactggcaagtggcgagttcgacgtaatcggcttccagctcgatgcacagctggatgatccgctcgatgttgtcgatgttgtgccggtgggtgacgaagttgagcaccatcggatagccgtgcgccttcaccgcgcgggccatcgccagtttctgggcgaaggccttgcgtgagccggcgagcaggttgttcacttcttcgtcggcggcctggaagctgatctgcacgtggtccagcccggcctcggcgaagcgcgccaggcgtgcctcgtcgaggccgatgccggaggtgatcaggttggtgtagaagcccaggccgcgccctgcctcgatcagttcggcgaggtcctggcgcagcagcggctcgccgccggagaaaccgagctgtgcggcgcccagctcgcgggcctggcggaacacctcgatccattccgcggtactcagctcggcgccctcgcgggcgaattccagcgggttcgagcagtacgggcactgcaacggacagcgataggtcagctcggccagcagccagagcggcggccccacgctttcactgcagctcgatccagaattgcgcatgggccacctcgaggaacgccaggatgtcttcgtctatgccggggacttcggggaaacgctcgcgcagcgccgcgacgatggccgccacgtcgcggcggccatcgaccagcttgaggatttccccggcgctgtcgttgagcttgaccatgccttcggggtagagcagcacatggcagtcctgggccggttcgaactggaagcggaagccccggcgcagcatcggcacgctgtcgagcgacggcaggctcatgatgccagcccccgatgccagacccgctcgcgggtcaccgtgtggtacggcgggcgttcgagttcgtaggccatgctcatcgcgtcgagcatgctccacaacacgtccagcttgaattgcaggatatccagcatgcgttcctgtgcctcgcgggtccgatagtgctccagggtgatccgcaggccgtgctcgacgtcgcgccgggcctgggccaggcgactgcggaaatactcgtagccggccgcctcgatccacggatagtggcgcggccagctgtccagccgcgactggtggatctgcggggcgaagagttcggtcagcgaactgctcgccgcctcctgccaactggcgcgacgggcgaagttgacgtaggcgtcgacggcgaagcgcacgccgggcagcacccgctcttcggagagcacctgctcgcgctccaggcccaccgcttccgccaggcgcagccaggcctcgatgccgcccgcctcgccgggggcgccgtcgtggtcgaggatgcgctggatccactcgcggcggacctcgcggtcgggacagttggccaggatcgccgcgtccttcagcgggatgttgacctggtagtagaaacggttcgccacccagccctggatctgttcgcgactggcacggccctcgtacatcgcgacatggaacggatggtggatatggtagtagcgtcccttgtcgcgcagcgcccgttcgaattcggcgcgatccatggcggcacggctcatgttggccccctacagctggatgtgcatgccatcccaggccacttcgatgccactggcatccagttcggcgcgttctgccgaagcggtgtcgaggatgggattggtgttgttgatgtggatgagcaccttgcgcgcggccggcaccttcgccagcacctcgagcatgccgcccggcccgctctgcgccaggtgccccatctgccggccgagcttgtcgccgacctcgcagaccagcatctcgtcatcgcgccagagcgtaccgtccaccagcaggcagtcggcgcggcgcatccattcgagcagcgcctcgtccacctcgccgaggcccggcgcatagaacagggtaccggcgctatcgaggtcctcgacgaacaggccgatgttgtcgcccggatgggggtcgccgcgatgcggggaatacggcggcgcgctgctgcgcagggggatcgcggtgaagcgcaggcgcggacaggccggaatggcgaaaggctcgccatcgagggcgatcggccgatggcgcaggccgccgttccagtgggaaagcatagggaacagcgggaagccttcgctgaggtcctggtggaccatctgcgtgcaccagacttcgtgcgggcagccttcgcgcaggctgagcaggccggtggtgtggtcgatctggctgtcgagcaggacgatcgcgccgatcgccgtatcgcgcggccgacgcgccggctggagggccgggaaggcggcgatctgggcacggatgtcgggcgaggcgttgcagaggatccagcgctcgccgtcgtcggacagggcgatggaggattgcgtgcgtggctgggccgctacgctgccgtcgcggaccccgcgacagttgcggcagttgcagttccactgggggaagccgccgccggcggccgaaccgagaatacggatgtgcatgggtctgccccgcgggctggagggaggccccggaagaccggggccgaacggatcagcggttggcgaagtagagggtcacttcgaaaccgagacgcaggtcggtgaagctgggcttggtccacatggggtcgatcctctctggtggggccgggcgattccggcaggtcgagttaaacatcagcggggctcgctccgaatgagactttcgaaggagttttccccctgatttggtagggactgcctgtcccgcccaaggttcgccgggagaacgccgttgcgccccctggttcgccctggtgcagggcagaagcctagtccatgcaggggcggcggcgaggcgaaaaaaaagacgcggccagggccgcgtcgcgccagaacccgccatggggaaagccgcgtcgggacgcgggacgagcgcacccgcaggtgccttggcggaaaggccgcgggtcggagcgatccgcggcggctgaggaccgctcagaagaagcccagcgggttgatgtcgtagctcaccagcaggttcttggtctgctggtagtggtcgagcatcatcttgtgcgtctcgcgaccgacgccggacttcttgtagccgccgaacgcggcgtgggccgggtacaggtggtagcagttggtccacacgcgaccggccttgatcccgcggcccatgcggtaggcgcggttgatgtcgcgggtccagaggccggcgccgaggccgtactcggtgtcgttggcgatggccagggcctcggcttcgtccttgaaggtggtgacgccgaccaccgggccgaagatttcctcctggaacacgcgcatgccgttgtgccccttgagcagggtcggctggatgtagtagccgctggccaggttgccttcgagcttctcgacgctgccgccggcgagcagctcggcgccttcctgctgggcgatgtcgaggtaggagaggatcttctcgtactgctgctgggaagcctgggcgccgaccatggtctcggtgtccagcgggtcgccgcgcttgatcgccctgacctttttcagcacctcctccatgaacgccgggtagatcgactcctggaccagcgcgcgggacgggcaggtgcacacctcgccctggttgaagaaggccagcaccaggccctcggcggccttctcgatgaacgccggctcggcctgcatgatgtcttcgaaatagatgttcgggctcttgccgcccagctcgacggtggagggaatgatgttctccgccgcgcacttgaggatgtgcgagccgaccggggtggaaccggtgaaggcgatcttggcgatgcgcttgctggtggccagggcctcgccggcctccctgccgaagccctggacgacgttgagcacgcccggcggcagcaggtcgccgatgagttccagcagcacgcagatgcccagcggggtctgctcggccggcttgagcaccacgcagttgccggcggccagcgccggggccagcttccaggcggccatcagcagcgggaagttccacgggatgatctgcccgaccacgcccagcggctcatggatgtggtaggccacggtgctgtcgttgatctcggcggcggagccttcctgggcgcggatgcagccggcgaagtagcggaagtggtcggcggccagggggatgtcggcgttgagggtctcgcgcacggccttgccgttgtcccaggtctcggtgacggcgagcagttccaggttctgctcgatgcggtcggcgatcttcagcaggatgttcgagcgctcctgcaccgaggtgcggccccaggcgtcggcggcggcgtgggcggcgtctagggccttgtcgatgtcctcggcggtggaacgggggaactcggcgatcggctggccgttcaccggcgaggtgttggtgaagtactggcccttgaccggaggcacgaactcgccgccgatgtagttgccgtagcgaggcttgaaggtgacgacggcaccgggggttccgggcgctgcgtagatcatggcgaagctctcctgtgtggtcgttccgccgtggcgcggcggactcgtgcaagggcgccgcggtcggcggcgaagggtcgggcgcgtcactcgtcgacgtgcacgctttccagatagctgcggatcgcccagaggccttcctggctgatgaagtcggccatcttcggcatgtacaccgcgccatcgcgcaccgcgccgttgatgacccgctccttgaaccattcgtcgccctcggcgccggtctccagcaggcgcaggtccggggcgatgccgccggacttggcttccaggccgtggcagcgcgcgcagttctggttgtaggcggaggcgccgatctcgacggcgaggtcgtgcttggcgtagggcttgcggtaggggttggtgtcgcgccattccttgcccagcggctcgagtcccttggtgtccactgcctggggggtcacatcgccgtgggccagcgccaggctcgagaggctgagaccggccagcaccagcaggccgcgcaaggcgttgttcttgttcatcacttcattcctccggggagacaggacaaggcacgggcgccaaacggcgctcatcgccatcctaggaagctccgccgcgcgcccgaatcctgctttgggcgtcctcgcctactcccttcggagtagagcctcggaaggccttacgcggggctttggcagcaagtccaagtcatgccccgtccgggaagtcttcccggacgaatcgggcgatcttccgttcccgtcggcgcgccccgcttccaccatgaagccgccgcggcccgagcagcggcctgccgtttctcgaccctcactccaaacgggaacccgatcatgacaacaagaacctcacccgcccctgccggcctcctgcgcccgagcctgcactgcctcgccttcgccgtcgccctgggcagcgctggcgccgcgctggccaaggatgtgacctgggaggacatcgccaacgacgacaagaccaccggcgacgtgctgcagtacggcatgggcacccacgcccagcgctggagcccgctcaagcaggtcaacgccgacaacgtgttcaagctgaccccggcctggtcgtactccttcggcgacgagaaacagcgcggccaggagtcccaggccatcgtcagcgacggcgtgatctacgtgaccgcctcctactcgcggctgttcgccctcgatgcgaagaccggcaagcgcctgtggacctacaaccaccgcctgcccgacgacatccgcccgtgctgcgacgtggtcaaccgcggcgccgcgatctatggcgacaaggtgttcttcggcaccctcgacgcctcggtggtggcgctgaacaagaacaccggcaaggtggtgtggaagaagaagttcgccgatcacggcgccggctacaccatgactggcgcgccgaccatcgtgaaggacggcaagaccggcaaggtcctgctgatccacggcagttcgggcgacgagttcggcgtggtcggccgcctgttcgcccgcgatccggataccggcgaggaaatctggatgcgtcccttcgtcgaaggccacatgggccgcctgaacggcaaggacagcacggtgaccggcgacgtcaaggcgccctcctggccggacgatcgcaactcgccgaccggcaaggtcgagtcgtggagccacggcggcggcgctccctggcagagcgccagcttcgacgccgagaccaacaccatcatcgtcggcgccggcaaccccggcccgtggaacacctgggcgcgcaccgccaagggcggcaacccgcacgactacgacagcctctacacctccggccaggtcggggtggacccgagcagcggcgaggtgaagtggttctaccagcacacccccaacgacgcctgggacttctccggcaacaacgaactggtgctgttcgactacaaggccaaggacggcaagatcgtcaaggccaccgcccacgccgaccgcaacggcttcttctatgtggtcgaccgcagcaacggcaagttgcagaacgccttccccttcgtcgacaacatcacctgggccagccacatcgacctgaagaccggccgcccggtggagcgcgagggccagcgcccgccgctgccggaaccggggcagaagcatggcaaggcggtggaagtatcgccgccgttcctcggcggcaagaactggaacccgatggcctacagccaggacaccggcctgttctacgtgccggccaaccactggaaggaagactactggaccgaggaggtcagctatacgaagggcagcgcctaccttggcatgggcttccggatcaagcgcatgtacgacgaccacgtcggcagcctgcgcgccatggacccggtcagcggcaaggtggtctgggaacacaaggaacacctgccgctctgggccggggtgctggtcaccgccggcaacctggtgttcaccggcaccggcgacggctacttcaaggccttcgacgcgaagagcggcaaggagctgtggaaattccagaccggcagcggcatcgtctcgtcaccgatcacctgggaacaggacggcgagcagtacctcggcgtgaccgtcggctacggcggcgccgtgccgctgtggggcggcgacatggccgacctgacccggccggtggcccagggcggttccttctgggtattcaagctgcccagctgggacaaccgcaccgccagccgctgatccccgcgccgcgccctgcgaggcgcggctttccccgcctgcggagtatcccgatgaagaccttcctcctctgcgccgccctgctcggcgccggcctggcccaggccgccgacgacatcgacgacgtccgcgtcatcgccggctgccgcctggagcccggcgcgcgctgcgccaaggccgacctgcgcggcgccgacctgcgcaacctcgacctcggccgcatcgacctggccggcgccgatctctccggcgccgacctgcgtcacgccaggctcgacctggccaacctggaaaaagccaacctgcgtggtgccgacctcacccgcgccagcctgcagcaagccaacctgcgcggggccgacctctccggcgccagggcggtggcgatccaggcctggggcctgttcgcccagggcgcccagtggcaaggcgccgacctcaccgccgcctacctggagttcgcccgtctcagcggcggccgcctgcaccaggccacgctgcgcgccgccgacctggagatgacctggctgtcccgcgccgatctcaagggcgccgacctgcgcgacgccaacctgcaggaagtcaagctggccgaggccaacctggaagatgccgacctgcgcggcagcaaggtgcgcttcggcaacttccagggcagcaacatgcagggttgcaaggattgccccgcgggctggcagtgaagcgccggacagcagcgacggcccccctagccgaggctgccgcgagcctcctcggcgagcggcaggcccagccgcagcacgccgctgtcgatggcccggtgcaccagttccgcctgggtactcacctgcaacttctgcttgagcaggctgacatggttggacacggtcttggcgcttacccccaggtgctcggccacctcgcgcagggccaggccacgcgcgagcaggcggaagatctcgaactcgcgacgggtcagcccgcgcaacgctgccccgccctgctcttcccacgactggcaggccaggcgcgtggccaggggctgctccagatagagctggccggcgagcactcgccgtatcgcctccagcagcaccgtcggcgccgctcgcttggtcacgtagccgcgggcaccggcatccagcgcctggcgcaccagggccagttcgtcgtggaggctgaagaacagcacacgcaactgcggcaggcgctggcgcagccggcgagtcagttccaggccgctgatgcccggcaggccgagatcgacgatgaccagcgaaggaatttcccgctgcaccgcctgcaaggcttcttcgccgtcgccggcctcgttcacctccacgtcggggagcagcccgcgcaacagcgcggccagcccttcgcggaccacgaaatgatcgtccaccagcaggaccttcatcgtcctctcctctcagtcgtcgcgttccagcggcatccgcaggcgcaacgccaggccctgtccgggacggctgcgcaggctcagttcagcgcccaggcagcgcgcgcgctggcgcatcgagtccaggccgaagccgggtgccgggtccgccgcgcagccgcgaccgtcgtcgcgtacgctcaggtagagaaagccgccacggcattgcaggcggatccgcacgcggctggcgccggcatgccgggcgacgttgttcagcgcctcctgcaacaggcggtagagatgggtcccggccgccgcatccaggggcggcagcggaccgcccaggcgcagctcgcaggcgatgccctggccttcctgccagtccgccacgcaggcgcgcagcgcctcgtccagcgactggcgttgcagggccggcggcggtagaccgcgcagcagcgcgcggaagctgtcgtccagcccctggcagtagcgctccaggcgtgccagcgccggctgcccgtcgcctgccgtgcagcgcagcaacaacagttgggtgcggatgcccgtcaggtactggccgatatcgtcatgcaccgcctgggccagcaagcgccgctcgcgctcctgcacggcgagcagccagcggtactccgccgggccggcgggtcgcaggtcatccatggcgtggctcaggggacgatccgacaggcctgtccgacggcgcaggcggcaggtctttcctggccgaggtggcgggaatagaggaaatcgaacccgagcaggctgaggatcagcaggatgggcaacaccagggtgacggcgatgcgcatggcggcgactcctgtccattgtcgttgtcgagacatgctaggacgcgcggagccacggcgtgctactaccttggtactgccgggccgctacttttgcgcggccacccgcctccagccgcccttgcgggcgccgccgatgcagcaggagcgctgcgcaagcgcctggtcctgctactttggtactggttcacccctccggacgtcgaatttccaaagcagcgcgcctgccctgtaatgacgcatacaagaagaaacgacgagaagccgccatgccccgccttgccttgccccgcgtagcgcccgactaccctgcggcggtcccgccgcagtaccgagttcgccttctccgcctacccggctgccgaccgtccgcgacgcgtccccggcagcgcgcggcggaacgcccacccgctgggctatcgcgcccacgactgctaccgtgagcgcattcgcatccgcccgcgtgccccgagccgccaccagccgcccataacgacaataacgaggtgcaggccatgtacaagatcctgatcgccgacgaccacccgctgttccgcgaggccatccacaatgtcatcgccgacggattccccggcagcgaagtgatggaaaccgccgacctcgacagcgccctgggcctgacccaggaacacgacgacctcgacctgatcctgctcgacctgaacatgcccggcatgcacggcctcaacggcctgatgaacctgcgcaacgaggccccgaccattcccgtggttatcgtctccgccgagcaggacaagcaggtggtgctacaggccatcacctacggcgcggtgggcttcatcaccaagtcctcgccacgcgcgcagatgaccgaagccatcgagcagatcctcaacggcaacgtctacctgccctcggacgtgatccgcacccagaagagttcgccgcgacgcagcggccacgaagaacacggcatctccccggaactgctccaggccctgacccgcaagcagctgctggtgctggagcggatgaccaagggcgagtcgaacaagcagatcgcctacaacctggacatcgccgagaccacggtgaaggcgcacgtctcggcgatcctgcgcaagctcaaggtacacaaccgggtccaggcgatcctcagcgccggcgacatcgacttcgccgcctacctgcgccgctgagacccgccgatgcccgaccgccgtaccctgctgctcactgtcctggcgatgctggccttcgccggcaattcgctgctctgccgcgcggcgctgaaggacaccgccatcgacgcggtcagtttcaccgccctgcgtctcttctccggcgccctcatgctcgccgtcctgctgcatctgcgccggcgcccggccacgcccgcgcgcggcggctggcgcggggcggcggcgctgttcgtctacgcggccgcgttctcctacgcctacgtgcagctggacgccggcaccggcgcgctgctgctattcggcgcggtacaggtcaccctgctgctggccggcctgctgcgcggcgaacggctgggcggacaggcgctgctcggtttcctgctggccctgggcggcctgctgttcctgttgctccccggagccagcgcgccgccgctgggcggtgccctgctgatgctcctgtccggcctcgcctggggcctctataccctgctcggccgcggcggcggcgatccgctggcggtcagcgcgggcaacttcctgcgtgcccttgccttcgccgccctgctgctcctggcattccacgggcagttgcggctggacggcgccgggctggcctatgccctgctttccggcgccctcgcctccggcctcggctacgccgtctggtacagcgcactgccggggctgacggcgatccagagcgcctcggtgcagctcagcgtgccggtgctcgccgccctctgcggcgccctgctgctcggcgagccgctcgccccgcgattgccgccggcgaccctggcggtgctcggcgggatcgccctgatcctcgccccgcgcctgggccgcgcggcgcgcgaaggcgcctgaatcagaccgaggcttcgcgctccagcaagtggcagagcgcggtcttcagcttcatcggccgcaccggcttgtgcatcagggtatggccaagctcgcggacctgctgcttgagctcgttgctgtagttggcggtgatcatcagcgccggcagcggcgagccgcgccgggcgttgatcgcggcgaccgcgtcgacgccgttgcgctggtcgtcgaggtgatagtcgacgatcagcaggtcggcctcggcatggtagttgtcgacctgtcgcgccaggtcttcctccgacagcgccgtcactacccggcagccccaggcttcgagcaacgtgcgcatgcctgcgcagatcgccgcatcgttgtccagcacccacacccgcgaaccacgcaggcgctcgcgcaggtcgtccgcgctggccagcggctcggcgcgactgcgcggggcatggcgggccagcggtacctcgatggcgaagcatgagcccttgcccggcagcgagccgacccggacccggtggccgagcatgcgggcgatcttgtcgacgatcgccaatcccaggccgagcccgcggtcctggtgacaacgctgtgactcgccgcgcttgaattcctggaaaatctcgccgagcttgtcggcggcgatgcccaccccggtgtcccagacctcgatcgacaggcgctgccgatgccggcggcaacccagcagcacgcgccctcgcggggtatagcggatggcgttggaaagcaggttgcggaggattcgcgcgagcagttgctggtcgctgcggaccagcgccccgcaggccacgaagtccaggcgtagcccttcgctggcggctacctggcggtactccgcggccaggttgccgagcagttcgccaagctcgaacggggcgatgtccggggtgatcacgccggcgtccagcttggaaatgtccaccagggtgccgagcaggttctccacgtcctccagcgaatggctgatgttgttcaccagcgcctcgttgtcccgcgccgcgctgccgcgctcctgcaaggcgctggtgaacagccgcgcggcgttcagcggttgcagcaggtcgtggctgaccgccgcgaggaacttggtcttcgacaggttggcctgttccgcctcgcgcttggcctcgcgcaggcgcgcctcgacctggctgcgctcgtggatctcgcgcttgaactggtcgttgagggtggtcagctcggcggtccgctcgcgcacccgctgttcgaggttctggtaggcctggtgcagcgcctcggcggtccgccggcgctcggttatatcccgaatcagcacgaacagcccggcgacccggccgtcggcctggcggttcggcacgtaggagcgctgcatgtagcgctcctcgccggacaacgcggtctcggcgatctcgaaggtcacgctttcgccggccagagcccgctcgaagtacggctccaggcgccggcagtgctcggcgccatgcacgtcgcgcaggcagcggccgagcatcgagccgctgggccagcggtaccactcctcgtagaccttgttggtgaattcgtagaccagttcgtcgctgagataggcgatcagcgccggcacctggtcggtgatcaggcggatccagcgctcgctggcgcgcaacgcctcggcgtggcgatagcgttcggtgatgtcggtgaaggtgttgacgaagccgccggtgggcagcgcatgggtacggatctccagcacccggccatcgaacaggcgctgctcgcgggcgctcagcggactcccctgggagtcctggctgcgcggcgtgagcaacggcaattcgctctccgccatgacttcggcgaaggcccggtgcccggcgatcggggccagcccgcagagctccaggaagcgccggttccacaactccagcacgccgtcggcaccgaccatcgccacgccctgggagagattgtccaccgcccgctgcaacaggtgcgacttctgcgccagggcctgctcgcggcgcgcggtctcgctgagcttgatctcggtgacgtcgctgtagagcaccgccagcccgccgtcgcgggtcggtcgctcgctcatccgcagccagcgctcgtcgcgcaggcggtacagggtctgctggtcgccgccgcgctgctcctcgacgatcagcccgccgctacgcgccagccggtgcagttcggcgcgacgcatgccaggaccgatccgcgcccggctgtcgatccacagcgcgcggaagcgctcgttgaacaacacgatgcgttgctgcggatcgaacaggacgaaggcgtcggagatgctttcgatagcgtcgagcagatgctggtgggcggtctcggcacgcaggcgagcgtcgctgagcaactggttgctggccttcagttcgagcatcgtctggctcagcgcgtcggtgcgctcgcggacctgctcggccagcaccacggaatactggaaggcgccgtaggcctcgtcgctctgcgcggcgctcgactcgatgcgtccgatcagcgcctggttgatccgctgcaacttgtgccgctcttcttcgagggcgacgacccgcgcctgcagctcagcgacggacacctccgcggggtcggccaatggcgaccccggtgaaggtctggttgatatgcatgccattgaattgctctccgtaggtgttgaagccgatcacctgctggctgcggagaaacgcggcggtagcttgcgtgtcaccgccgacctccagctccaggcgccgcaggaagcagtcgcaaccgatggtcagcaacggcggtccgaggcgctcgtggaggcggcggaactgcgcctccaggttgggcaacagcgggccggtgctcatcgcggtgagaacgatgccgttctccaccgcacagtagaacgtcaggctcaggtcctcgttggcctgctggatcgagcgcacgtaatagcgttcgtcgacccgcaccgccagcggatgcgcggagaacagggcgaaatccagcgcctgcggtgccaccccgaccagccgggcgtattccagcgccgccggctcggcgttgagttcgtggacccgccggctgccgctgtcggcgcgggtcaccaccaacttttcggcgcgcggcaccacgtgatgggtggtgaagacctcgaagtccagccaggtgttgaccagcaccaccactgccgccccggtatggaactggccctggtggtagacatgggtgtgggtcaggtgccggtcgtcgccggccgagccaccgaagtgcgggatcgcgccgagcgccgcgccaagcgcggcgagcaccacctcttcgcggctggacaggccgtcgagcaaggtcagggcgaagctgtggttcttgatcggcgccaggccgccgcggcgacagtcggccaccagggtctcgaccatctgctgcgcgtccagcaggctgaagcgctccatttcgtcgatcagcgcgctgctgatggcgaagctgcgcacgtcgaagcccaccgcgctgacgcagccgcgcccgtagcccgccggagtgatctcgccggctgtggtgcagccgaccaggtcgataccgccgaagtagcgttcgagcatctcggcaagggccggcaggtcgtattccgcggaacagaagaacagcacgaagcccaggtgcggatggataagctggcgcgccaggtcctgggccaccacttcgacgtcgcgcgcgctggacatgcccctgcagaccccttccccctgcccttcgtacatgcccgctcccccgtcgttccgcctcgccagcattctacgaagggcgccgccgcggcccctatcctacttgggtcgcggcggggtccttcgaaagtagcggtatcaccagttcagtacggcgccgagggccacggtgtcggtgtcctcgtcgagcgcggcaccgtcgcgcccgtcgatccggtagcggttcagctcggcgaccagcttgaggttgtcgttgatcgtacggaaataggcgatgccgcgactctcgtagtcggccgcggaacccaggccgttgccgtcgtcgacggtcttgccgtaggacagcgccaggcggttcttgccccatgaatacgagccctgcagcaatgcgccgcggctgtccacctcgcgcagcgcggcttcgccggcgttgttggtgaagaagggattgatgcccttggcggtgaaccccgaaccggtcacggagaagccgcccatcttcacctgcaagccatagccgacccccttggaagtcacgctgtcgacgctgtcgctggtgttcttcgaagtctggtagccgccgttgatccagctgtagacctgcgccccggccaggtcgaactggtagctgacctcgctctcgtagcgcgggttgtcctggtaggccttgtcgtcgaggccgtcgctggcatctttgtcgatctggttggagtcgatcgggtcgaggatgcccacggcgatgcgcaggccgggcagcaggttattgttgcggtaggtgatctgcgaggtggggaacggatacggatagccggtgccgatgttgccgaaggagacgcccttgccgtccaccaggccgagggtgtcgctggggttgccgaaaccggccagcagttcgtcgaggaagatgttcgagcgcgagaacaggccgaagtccttgccgatcagcacctcgccccagtcgccggcgaccgtgccgtagaactgacggacgtcgatggcggtatcggtgccgtcggtctcgctgtcgttgatggtcacccagaaggaagcgcgaccaccgaggctcagctcgtcgaccttcctgccgaagttgaagccgatgtagttcggcaggaatcccatcttcacccgcgactggcggcgatcgtaggtctcgccctggcggtcgacgtcgctgttgacgtagaaggcgttgaagtagccgtcggtggaaaaggtggtctcgtccttgtcgtacagcaggatatcggcggcggccggttgcaggccgcccagggcacccagcgaggccagggtcagcggcaggattcggcgaacggcggtgttgttcttgttcatggcgcactccgcgaggtgaaacgaccgggccggtcgtggcggagccgattatcgaaaccgggaaagccctgccatacgcttccttgggcctgcttcgacgcttcttcatggtgggcgtgggtgccgctgcgcaaggcgcgggcagcgctcctccggcggtagcgcaaccttggtcgcggcgggagcgccaccgaagcagcgcggctttcgacctaacgccgcagtgacgccggcaaggctgtcgtcgagttaccgcgtggctcgcttcagcgccggctggaaagcacccaccagccgccacgcgcctccagcaaccgggcctgggccgcgagcaggtcgtcgccgctcaggccgagggcggcctcggcgagcagccgggagcgaccggcaccaccgccaaggtgctccgcccaggcgcgccgtgctcgatcggcgaagctacccggtgctcggcgcaggtcgtcggcgagggcttcgcgcaggccggccaggcgtcgcgccggcagttgcgcgagcgcctcggcggagcgctggaggaaggtctccatatgctccagcaggcgttccgggcaggcacgcggagattgcgcggcgaacagcaggccgcgccgggcgccgacctcgcggaagccgcagaacaacgcgtagcccagttgcagctcgtcgcgcaggcgccgctggaaggccggttcgtgcaggcgcgccagcaagcgccaggccgcctccatcggcacctcctgcgcgggcagcggacagaacagcagcaacgccgactcgccgtccatggccagttcgcggcgatgccgtccgggcctcggcggcagaggctccaggcgctcgccggcagcctggccgggcatccatcggggatctggcatcgcggcctgcatgaccaaggcgtcccagcgggtccgccgccagtcgtcgacctccgccagcggctcgccgagtaggccgggcaaggcgtccagcaactgccggatcggcaggccagtggcgctgcggcgccgctcggcggaggacagacgctcgccgtttgcgcgccagtcgggcggcgccgcgaggagccgggccagggccgggcgcacggcggcctcgaggcgatcgcgcggaccgagcaggctcagcgaccagtcttcgccgagcgcctccaggcccatctccactccccccaggcgcgcctggccgcacagcggacgcaacgcctggcgcagcgccagaaagcgtgaccgtgcgggcacgccgggaaagcgccagcgcaggaacagcgcgccctcggcggcggcactgggcggcaacggcagttcgaagcgccaggcatgccgctgcgcggccagcggcagcgctgcggcaaccggcgccacactcaggcggaagcccgccgaccagcgcgcttcggcaccgtcgagttcgccgtccaggtgcagccgcaggcaacggtcggcgcgcagcgcgtccaggcaggccgggcgaatctccgctggcaggccaagaacgcgctggcgtagtcgttccagcggtgcagtgggctccgccagcaacggccggcgcgccgccagcaggctggcggcatcgtcgcgcagggcgcccagccagtcgaaaaaggccgcctccagcgccgccgccgcgctgccgtcgaacagttcgaaggtcaacgccaggagcgcctgccgcgcatcccgatgaaccacccgcagcgccgccgattcgcccaggccctgttcgccgagtgccgccagcaacccgcccggcgagcgatcgccgagcaattcggcgaacgcctgcagggtctgttcgtcggcctcccgcaaagcgtcgagggcaaagcccagcaccagccgcggcggtcccggcaggcgcagcgccagcgcttcgccggcgaagggcagcaacggcggcggcggcggactcgcgcctggcgcgcgccccggcaggtcggcgcaggcacgctgcgccagcctctccagctcgtccagtgcctgcggcccttgcagccatagctggcaattgccggcgtgatagtgggcggcatggaattcgcgcagggcccgctggaacgcatcgttctccagggccaggctgtcgcggcgcccggcagcgaaacgccgcagggggtgtccggcgggcaggccgagggccagcgccgcgtcgatcagggtctgctcgtcggccgagcgcgccaggtattcggcctcgagtacttcgcgctcgcgccgttgcgcatcgatgtccagcaaggggcgggcgagcatgtcgatcagccgtgccagaccggcgccaaggtgctccgccgtcacctcgaagaaatagtcggtggtcctgccccgggtgctggcgttgacctggccgccgcgcacctgcaaccacggcatcaggcgctcgtcgccggggaacgccgcgccaccgagaaacgacaggtgctcgaggaagtgggccaggccgggatgcgcgctcggctcgtcgtggctgcccgccgccacccgcagccaggcagcggcgcgcgatgccgccggatcatgcgccaggtgcaggcgcaggccgttgggcagcacgcaggcgcggctcctggggtggtgttgggcgtggcgatccatgggcgtcctcgcgggttccgaggctgaaccttacccttccgcgaggcgaaggaaatagtcctttcgccgagtcgtatcaggaagccggcggctcctggccagacgcttcctcggagtacagcgcccgtccgccgtcggccttgagcgcctgcaggacctccggcgcacggcacggggcgaacaggtcgaggccgggatcgtaggcgccggtgcgcacttccagcaggccgagcatcgagtggaacaggttgtcctgggacagctcctcgttgctgcgctggcgcaggcagctactgtcgaggccgaaggcgctctggtagccgggcgagaaccaggccagcatgccgacgtgcttctgctggtccggcgccagcaggtaaggcgtgccatgcaggtagaggttgtactcgccgagcgactcgccatggtcggagaggtagagcatgccggtatcgatgcgctcttcgttcttgcgcagcaggtcgatcaggctggccagcacgtggtcggtgtacagcagggtgttgtcgtagccgttgatgatgctgtcccgcgagcaggcgctgaagtcgttgctggcgcagaccggggtgaacttctcgtactccctgggatagcgcttgaagtaggccgggccgtggctgcccatctggtgcaggaccagcacggtgtcctgttgcagtccgtcgatgaaggcctgcaagtcgcgcaggaggatctcgtcatggcactcgccgccggcgcacaggaccggatccttgctctcgctcaggtcctggaaggcgacgcggtcgcaggtgcccttgcagccggactggttgtcccgccacaggacccgcaggcctgcgcgctgcaacacatcgagaaggccttcctgggtgcgcgcgcgagcgtcgctgtagtccgcgcggcccaggttggagaacatgcagggcaccgacaccgcggtctcggtaccgcaggagtgcacgttggagaagttgatcaggccctcctcggccttcagccgcgggttggtctcgcgagcgtagccgttgaggccgaagttctgtgcccgcgcgctctcacccaccaccagcacggtcagcgacttgcgcgcatggccctgccacaggtcggcgcgccgggcatcgacggcgatcggccgcagcggctggctggcggcctgggcctggcccttggcgtagccgatggcggcgccgaccaggttgctcggggtgacctgcaggcgcagttccttgttgttgcggaacagcgaggacagcccctggtaattggtcagcgccaccccggcaagcagggccaggcaggcgagcgccaccagcagcttgctcagcagctcgcgtggccacggccggtagcgcaccggcgtgcgccacagcagccagaccggcagcgcgccaagcaacgccaggtagacggcgagcttcggcgaaagcaggtcggcgacctcggccgggttggtctgcatgacgttgcgcagcatgccgacgtccatcagcacgccgtactgggtcatgaagtaggtggtaccggcggccgccaggatcagcagggtcagcgccggcttgagcagccagcggaacgccagcagggtcagcgccaggttgaagatcgcggcgatcatcaggccgaccgccagcatcatgccgaggccctgccagccccccggggtgatcgccagcaggcgttgccacagcggcaggttgtagaacagcaggaaggcgaggctgaccagcagggtcagcagttcgggacggacggcgcgggctttcgacatgggcacggatcttcactgacttccgggttgccgtgcgcagcgttgcccctggcagcactcgacgacggcggcagtctgctcggcgatccgtcaatctttcgtgaagaatacctacagaaaacgtaaccctccgaaagcgccgaaacccttgtattccggggctttcagccggattgcaaaaagttcgcgggaagctttccgggagctctccgggttcgccggcatccccccgcatggcgccgccgatgcgggcggaagacagcaagcggcaaggaacgcggagcgctccggcgccagtgcctacggactgttctgattgcgacgtcgtttttcaacaaaaggacagccagaccaatgtctatcccgcgaccccggcattttcgttagcatgccaagcttacggcccggttcccacaaggacggcggccgcctcccctgctcgtcccatccagatgagtgccgtttcccctaccccccgggaaacccttctgtgaatttcctcgagcagcgcggtacctctccagcatgaacgctttgaaaggccgggacatcctggcgcttggttttatgacctttgccctgttcgtcggggccggcaacatcatcttcccgcccatcgtcggcttgcagtccggcccccatgtgtggctggcggcgctgggcttcctgatcaccgcggtggggctgccggtgatcaccgtgatcgccctggccaaggtcggcggttcggtcgacgccctcagccatccgatcggcaggtatgccggcggcctgctggcggcggtctgctacctggcggtcggcccgctgttcgccattccgcgcaccgccacggtgtccttcgaggtcggcgtggtgccgctgctcggcgagagcggcacggcgctgttcgtctacagcctggcgtacttccttctggccctggccatctccctctaccccggtcgcctgctggacaccgtcggacgcttcctcgccccgctgaagatcctcgccctggcgattctcggcgtcgccgccttcctctggcccgccggcccgatcggcacggcccagccggagtacacccaggccgcgttctcccagggtttcgtcaacggctacctgaccatggacaccctcgccgcgctggtcttcggcatcgtcatcgtcaacgccatccgttcccgcggcgtgcagtcgccgcggctgatcacccgctatgccatcgtcgccgggctgatcgccggcgtcggcctggtgctggtctacgtcagcctgttccggctcggcgccggcagccatgccatcgccgccgacgccagcaacggcgcggcggtcctgcatgcctacgtgcaacataccttcggcagcctcggcagctcgttcctggcgggacttatcgcgctggcctgcctggtcaccgcggtcggcctgacctgcgcctgcgccgagtacttctgccagcgcctgccgctgtcctaccgcagcctggtgatcatcctggcagggttctccttcatcgtttccaacctcggcctgaccaagctgatccaggtctcgatcccggtgctcaccgcgatctatccgccgtgcatcgtgctggtggcgctgagcttctgcatcggcctctggcattcggcgacgcgcatcctcgccccggtgatgctggtttccctggcgttcggcgtgctcgatgccctgaaggcggcgggcctgggccaggacttcccgcaatggctgctgcacctgccgctggccgaacagggcctggcctggttgatcccctcggtcgccactctcgccgcctgcagcctggtcgaccgcctgctgggcaagcctgcgcaagtcgccgcctgagcaggccccagcggcctgccgcttgttctcccggccgagcgcgggacatgccggcgggcggcgccaatcgcgtcgtacaccccacggcccggctggcgcctgccgccgccggcagcgcttcttcccgcgttcagccgaacgaataagcactatcgagcaggatgatttctagcgcagcggcgcggttgttagcctttcgaccattcccccaggaaagcgaatccaggagccggtcatggccaaggcactcatcagcgtactgttgttctccctcgccctcgccggctgcgccagcgactacaacccctctcgcccgtacagcagcgacgaggtcaggcaactggcgctggaggacctggcccggcgcagcctgtcgttcgaggaataccaggccaagcgtcaggcaattctcgaggaaaaaccgcaaaccgccgtcagccagtccaacgccgccctacgcagtaccgccatctgaggcctcgtcgaacggccaagagaaagccccgcgatgcggggcttcttcgtattcggggctgggcggtcagccgcaggacaggcgcttgatcaccagcgtgtcgtcgacatcgatgttcagccggcgcgggttgtagtccatggtcaccgcatcgtgcgggcgcagcgcccgggcgacttccgctccggcggcgcggcgggcctcctcgacgatggccgcggaagcctgcttgccgacataggcctgcaccgcattggcgtcgcaacggccgtccgctgccggggtggccgcgggcgcgctggcgctgccggtggctacgctggcgccttcggtggacgggccgtcgccgttgctgctgcaaccggcgagcagggccgcgagaacgagtgcactggaaaactgcttcaaaggcataccgcctcctctgatcttctgggatcgccaccttaccagtggcatgggtttcctggcgaaactgcaatccgcgctgacaaattcgccagcttcagtcgccgctcaggcgctgcagttcgcgacgcaccatggccgcgtattccggcggacgcaggaggtagagctggcccgcgacccagtccagccagcggccgccctgttcggcgcgggcgtcgagcaggcgccgcgcctcttcctccgcccgttgccggtgctgccgatggaatgcctggcgcttcgacagaccggaagcatctccggttcgatcgtcgggagtgtcggtcatggctctcttcgcaacctgctgcacaagtcggacattctaaccgcggaacgccgttgccgttcgcggcaagcgcttgcctccgccccgccctgcgccatgcgccgagccctctggcgcggggttcggcgacctggcacggcccttgcgacggagcggcggtcattcatttccatggaagcaggtcatgaacagcataggtcccgccagcctttccggctggtctgcgcgttacctgaacaaccagcggcaagccaacaccgagatcggcaacggcgatctgctgaaagcgcgccccgcccttggcacgccattgcgcaacgaggccgtcgatcccgccgcggagtccgcccgccaggccatggacgagggttttgcgaagctgaacctgacgctgaagcagaaccaggcgaatgcccctgccggcgccagcgaaggcaagtcggcctatgaagagttcaaggagtacatgcagaaatcgcctgccgagcggatgcgcgagcaggtcctgaagagcctcggcctgaccgaggaggaactggacgcgatgccgccggagaaacgcgaacaggtggagaaaggcatcggcgaacgcatgcgcgagatgatcgccatgcagaacggccaggcgccgggacggcaagaggacccgacgcaggcccgcgcgacgctgaacgcctggatctgagccaggcgcgcgccagtctctcagcgctgccgggcgacgacgcgcttggcgtagctggcgcgctccatctcgcgcacttcgacgctgacctgcacgccctcctcaccgccgcccgccaccgctccggcgagcacctcgcagagcgactcgcccagcgcctggcgggtcgccgcgtcgcgcccgtcgaggatcgacaggcaggcatgcaggtaggcgcgctcgaccgccgcggttccctgccggtaggcctccagggtaacgaagcgcgacttgatgtccgcctcgccgaattgcccggaagcgaacagcgcggcattggcctgctccagcagttcgccgggggacgtttcgaggcggaggttggcagtggcttcgataacgagatgcggcatgctggcgggccttgcggggaatggagagcgggattctagcggctcgacgagcgatgcgacagccggcctgcgcctgcgtggctcagatcaacccggcggccgcgaaagcccgcgcgtagatggcgcggatcagcgcgtctcgcaggcctgccgctggcccttggccggcgtgtacaggtagccgggcgtgtcgcccgcctggcggtacaggaccgaaccgtcgctataggaaatcgcgctcagcgcctggccatcggcgaggctgcggacatcgccgcccagcgactggacgctgctgccgtcgggcagcttgagactggcgaaaccgtcgatcacctcgagtttgccgaagtctccgcagtgcaacgccagcggcccggaagcggcctttccgtccgacgatgaatccccgcaaccgcccagcagcgacagaaccaacaacgcggggagaacagcgggcttcatcggggagtcctttgcggatgagcggaagacgggactctaccacctgccgggcagcgggaaaaaccgcttcggcgtacgctgtcatgcaacggcaggcgcacctgtgagacaattcgccgaatgccaggcatcacaccccgccttcatcgcgctacagccacgtcatgacgctggctgcggcactccacgaatgcccgcaggatcgacccatgctccagatggagcgcagcggaaagccgagaccggcagcagaccggtatcgccacggtccaggcgtgcgtaagtcctctataggtaaagaagttgatctccaccgcgaatatcaccatgcagttcggcgccaagccgctgttcgagaacgtttccgtcaagttcggcaacggcaaccgctacggcctgatcggcgccaacggttgcggcaagtcgaccttcatgaagatcctcggcaacgacctggagccgagcgccggccaggtcatgctggaacccaacgtgcgcctgggcaagctgcgccaggaccagttcgcctacgaggacttcagcgtcatcgatacggtgatcatgggccacgaggaactctgggcggtgaaggccgagcgcgaccgcatctactcgctgccggaaatgagcgaggcagatggcatggcggtggccgagctggaagtccagttcgccgagttcgacggctacaccgccgagtcccgcgccggcgagctgctgctcggcctgggcatcccgctggagcagcacttcggcccgatgagcgccgtcgcccccggctggaagctgcgcgtgctgctggcccaggcgctgttctcggacccggacgtgctgctgctcgacgaaccgaccaaccacctggacatcaacaccatccgctggctggaaggcgtgctcaccgcgcgcaacagcaccatgatcatcatttcccacgatcgccacttcctgaacagcgtctgcacccacatggccgacctggactacggcgagctgcgcctgttcccgggcaactacgacgagtacatgaccgccgccgaacaggcccgcgagcgcctgctgtcggacaacgccaagaagaaggcgcagatcgccgagctgcaatccttcgtcagccgcttctcggccaacgcctccaaggccaagcaggccaccagccgcgcccggcagatcgacaagatccagttggaagaggtcaagccgtccagccgggtcagcccgttcatccgcttcgagcaatacaagaagctgcaccgccaggcggtgaccgtggaaaacatcagcaagggctatgacggcaagccgctgttcaagggcctgagcctgcaggtcgaggccggcgagcgcgtcgccatcatcggccccaacggcatcggcaagaccaccctgttgcgctgcctggtcggcgacctgccggtggacggcggcgaggtgaaatggaccgacagcgccgacgtcggctatttcgcccaggaccatgccgacgacttcgccgacgacatgagcctgttcgactggatggcccagtggacccagggcggcgaacaactggtgcgcggcaccctcggccgcatgctgttctccaacgacgagatcaagaagtcggtgaaagtgatctccggcggcgagcagggccgcatgctgttcggccggctgatcctcaagcgccccaacgtgctggtgatggacgagccgaccaaccacctggacatggagtccatcgaggcgctgaacctggcgctggacaactatccgggcacgctgatcttcgtcagccacgaccgcgaattcgtttcctcactggctacccgcatcatcgagctgggcgagaacggcgtgaccgacttcagcggcagctatgacgactacctgcgcagccagggcgtgatcgtctgagtccccgtcgcgcaacgcaaaagccccgcatccgcggggctttttcattccggcatggacgcgcagggcctatggggagcgcgactcagtcgacgtagccggccatcatcgccgcgcgggtcgccaggcgctggccctcggcgatcttctcgcgctgttcggcggtcagctcgcggggcgggtggtccttgatgtaggcagccacgttcaccccgatgtagacgatcagggcggcggcgatcaggacgttcttcggattgatgtccgagcgccgcttgcaggcttcgcagatgccgttctcgacgagacgggtcgctcgggcgccgcagttgcggcagtaacacgcgctcacaggccggttccttgtgcttgtaattgtccggccaatctacacgcagcgcgccgctgcgcacaacgcgaaaaccccgccgaagcggggttttccgatgacgcggggatcaggccgcggcgaactgcccggcgatctgccggcgggcggcggcgatggcctgggcgcggggctcctcgccataggccaggccttcggcgcgaaccacttcgatatcggtgatgccgaagaaacccagcacggtgcgcaggtagccttcgtgggccgcgccggtcggctggccggcatgcacgccaccggcggtggagacgatcaccactttcttgtcgccggccaggccaaccgggccgttctcggtgtagcggaaggtcttgccggcgaccgcgatgcgatcgatccaggccttgagctggctggagatggtgaagttgtacatcggcgcgccgattaccacgacgtcggcggcgaggaactcttccagcacttcttcacccaccgcgacttcatgcttcagcgcggcatcgcgcagctccgccggggtgctgccggcggccagggtcagggcggagaaatgcgccaccgcgtcggcggccaggtcgcggtaagtgacgtcaagcccgtcttcgttctgccgccaggcctggaccagctcggcgctcagttggcgggaagcggaggcgtcgccgaggatgctggaatcgatatgcaaaagtttcatgtctcgctcctgaaagtgggggatcgcagtgtggcgatcgagtggtttgcatcctaccggcaaggccaatcgacgattagtcggtagaaacatgactattcgtcccacacataggacaatctgtttttccccccagcggagcgcctgcatgccccacgacctcaacgacctctactacttcgccaaggtggtggaatgcggcggcttcgccgcggccggacgcgagacggggattcccaagtcgcgcctgtcgcggcgcatcgccgagctggaggagcgccttcaggtgcgcctgctgcaccgcacgacacgcaagctggcgctcacggaggtcggcgaacgctacctgcagcactgccgcaacctgctgctggaagcggagatggccgaacaggtgatcgccgagctgagcgtcgagccgcgtggccggctgcgcctttccgcaccggtggccatggcttcgagcaacctggccgacctgttgccgcggtttctcgaacgacacccgcaggtccagctggaaatcctcctgaccaaccgccgggtcgacctgctcaacgagggggtggacgtggcactgcgcgtgcgcgaactcggcgacgaggaccctgcgctggtctgccggcgcctggctccggcgaccacgcagatcctcgccgccccgtcgctgatcgccgggcgtcgcctggaacatccggaagacctcgaagacctgcccttcctcggcgctattcataacgaccgcaaggtccacgcgaccctgatcgggccggatggcagccgctaccagttggaacgcgaaccgcgcctgggcgtcgacgacttcgtcctgcgcaagaaagccgccgtggccggcctcggcgtcaccctgctgcccgaaggctactgcgacagggaactggccgatggcagcctggtgcgcatcctgccgcagtggaccttgccgaaaagcaccatgcaggccgcctacctgccgcgcagcagccagattccggcgatccgtgccttgatcgactttctcgtggaagccctgcaacgcccctcgggcgagaccggcccggcctaccgccgcgcccgcgagtgagccgcgccgttcagccgatccgctgcaacagcgcggcggacaggcgcccgccgagcaggctgtcgagccagaacgactggtgcagcaggacgatgccccagaacaccagttggaacgagagcttgcgggtcttgtggcggaatacctgctgcgcgaccagcgcgccaggccagccgccgagcagctcgaacaggtgcaggcggacctccggggtacgccagtcgccgcgtgcggcgctgcgcttgtcccgccagtagagggcgaatgcgagcaggctggccagcggataggccagcagcggccagagggcctgtccgtccaggtacatccgccaggcgccagcggccggcagcacgcagaggatcagcaggaccagcagcttcgccaacgggcgctgcaacgcgctcggcggagtcggcgccggccgtgcctgggcccgcgtcaccggcgcctgggcgccacggcggacagttggcggatcgatggtcagcgcgtccagccgcgccctctcggcgcgcaggcggccctgggcatcctggctggcgagaaaccacacctggtcgccctggcggggacggcggtcgccgcggaacgcggagatatgcaggaagacttcttccccgccggtcttcggcaggatgaagccgaagcccttgtcgtcataccagcggctgatcatgcccggcttttccatatccacatccactcgctcgctacccgtttcgcgctgcattctagccacccgcggcggccagacgaaaaaaggcgcggctcgcgccgcgcctcttgcctgttcccgggcctcacacctcgccggcggtgctccagtcgatcaggtggaattgccaggtcgccaggatcagcaggccgaaggcgatccgataccaggcgaaagccgcgtagctgtggttgccgatgaacttcagcaaggcacgcaccgccagcatggcgaagacgaacgaggtgacgaagccgacggcgaacaccggcaggtcctcggggcggaacaggtcgcggtacacgtatccggaatagaccgccgcgccgaccatggtcggcatcgccaggaagaacgagaactcggtggccgccttgcgcgaaaggccgaacagcaggccgccgatgatggtcgcgccggaccgcgaggtgccggggatcatcgccaggcactgggcacagccgatcttcagggcgtccttccaggtcatgtcgtcgacgtgttcggcgcggatcacatgcttccggcgctcggcccagagcatgaccaccccgcccaccaccagcgccagggcgacggtgatcggattgaacagccactcgtggatcaggtcggcgaacaggacgccgaggactaccgccgggaagaacgcgatcagcaggttggcggtgaaacgctgggcctggcgctggctcggcaggtcacggacgacttgaaagatctttccccgaaattcccagacgacagcgaggatcgccgccagctggatgatgatgttgaacgccttggcgcgttcgccgccgaagccgatgaggtcggcgacgatgatctggtgcccggtgctggaaatcggcaggaactcggtcagcccctccacgacgcccaggatgaacgcctggaaagcagtccaccactccatgtttctcccccttctactactgtcccgaacgagctttcgttgttctcggcgatacactcgccgtcttttatgaaggccttacgactccgaagaacccgaccagttcccccactgccgaagtcgaaaccggcgggcatgctaccagagcggccggccaggaatcttggaattcttgccagccggcgtctgaacaaatctgtccgcgcccgtcccctccgccctggtcttcgcgaagcgccggatacattcgctacaatgcgtcctcgtcgcatgagggccttccgtgtcaccccttgaactcttcgccgcttcgctcggcgccatcgccgtctacctgaccgtccgccagaatccctggtgctggcctatcggcctggtgatggtggcgctctacgcctggatattcttcgaggtgaagctttattcggacatgctcctgcaaatggtctacgcggcgctacagctctatggctggtggcagtggacccgcggcgggcaggaccacgacggccgctcggtgagccgcctgaacgccgcgcagcgcctctacgggctcggtgcgggcctggtcggcagcgtcgcgctcggttacctgatggccaaccacaccgatgccgccagtccctggtgggacgccggattgaccgccttcagcctggtggcgcaatgctggatggcgcagaagcgcctggaatgctgggccctgtggatcgccgtggacgtgctgttcgtggcgctcttcgccagcaaggcgctgtacctgaccgccgccctctacgccctcttcaccctgctggcgatccacggctggcggacctggcgccgcgacccggcattgcgcgagggcgtcgccgcatgaaggtgctggtactcaccgggcccgaatccagcggcaagagctggcttgcggagcagctccaggcccgcttcggcggccgggtggtcggcgagtacgtccgccacttcatcgacgaacagcgccgcgacacctgctacgccgacatccccgccatcgcccgcgggcaactggcctgggaggacgccgctcgcgcagaacggccggcgctgctgatcctcgatacccacctgctgagcaacatcctctggagccggattctcttcggcgactgtccggactggctcgaacccgccctgctgcggcggcgctacgacctgcacctgctgctctcgccggaaggcgtagcctggagcgccgacggccagcgctgccagccggaactggcgcagcgccaggccttccaccgcgaatgccaagcctggctggagcgccatcggcagccctaccgcgccatcgccggcgactgggccgagcgccggcgccaggctttcgccgcagtgcaagggctgctccgggacggctgacgggccggccctgtcacgccgccgatacaccgccagcgcggtccgggccttggcgcagagcgtttcgcgacggcgccgcggaaagctgtctcggcgctgaaacagctccaggcgcgtccccggcaggcttcgccccctggttggcgggcctgctgttgcacggatgcaacactgtccgccaggttcccccggcgctcacctccaagcccttgatggacaaggaaaacgcaaaaccggcacgccccatgctcgctccctgccaacgctgattagggctcagcgccaacgaaggaagcgccatcatgtcggggagttcgctacgcatcgtcgttccagcgctgctggtcatcgtcggctccgtgccggtgagcctccccgcgcatgcggcggacggtacgatcgtcgtccagcgccaggtccagccacgggtcgcctaccgtccgagcatggtgcccgacccacatcccaccgtcgtcgacaccaacgtctccgccgaggtcaacgccctcgccaacggggcggccagcggcaataccgtgagccgcgaactgggcgatgccgacttcgccatcgtgaccagcggttccgggattcgcagcatgattctccccggtggcgccctgccgggtttcgccaaccagccggcgaacccggcgacagtccaggccgtcggtaacgtcggcaccacccacggcgcgggaggcggcgccggcgccggcctcgccgggcagatcaacggcagcctcaagcagggcctggcgccgctgcagatgctcgggggtggacaatgaagcgcctgtccgccctcctcctcgccttcgcctgtatcgcgtcgctccaggccgacccgctggcctcacgcaatcgcgccagcatcgatgccagcggcacctaccgcggcaacttcgccctcaaccaggccgccggcgacgcccagcaacagagcaacgttcgtgtcgtcgcggtcggctccgcggccctcgtcggcagcgaccagcgccagcatctgcaactcgacgccagccagccgatcgcggccagcgccagcatctcgggggcggcgctacgcggcagcggcatcctcggcgtcaaccagggcgccggcctcggcaaccaacagatcaacgccttccggctgagcgtcagcaacggcccggaaagcctggatgacagcgttctcgcgcaaagcgtggcgctgaccaaagtctccggttcggccactccggtcccgggaggacgcagcgtctcgacggacgatcgcgccttcgccgggagcagcggcgtggtgcaggtgaaccagagcgctggggtgggcaatcagtcgatgaacaccctcagcgtcagggtcatggaatgactctgccaagccaacacaagcccaacactaagcacagaaatgcaaggagaaacgccatgaaagcgactatggtcctgaccccgctggccctggcaatggctgcagtgctgtcggtatcggcctacgccggaaacgaaggtggctggcacccgccgaaacccaacccgcagtcgaacaacaagggcggagccacggccctggtggtggatacgcagcagaactacaacaacaaggtcagcaacttcggcacgctgaacaatgcctcggtgagcggctcgatcaaggatgcctcgggcaacgtcggggtcaacgtcgccgccggcgacaacaaccagcaggccaacgccgccgcgctggccagcgccgacgccagcttcgtgttcggcaccgcgaccgccagcaccagcgtgctgcagagcggctacggcaatgcgctgaacaactactccaaccccaacaccgcatcgctgagcaactcggccaacaacgtctcgggcaacctgggcgtgaacgtcgccgccggcaacttcaaccagcagaagaacgacctggccgccgccgtctccaacggccagtacagcactgccggtagcgccgcgtcgcagacctccaccggcaacaccaccgtcaacagcgccaactacgcctatggcggcacctacgtgtcgctgaagctgaacgccgacggcagctacaagggcacctccgaccagatcggcgacgtctacctcgacacctgggaaggccagacccatccgggcggcagcaataccggccacatcgacgtggacagccaggcccagggcgccaaggacctgaaccacgacggcggcgcgttcgccttcaaggaaaagggcgacgtcgacctgaaaggcacggtgtccggcttcatcccggcgatcgtcggcttcaagaccccggtcaccaacaacgccagcctgagcaactcgttgcagaacgtctcgggcaacgtcggggtgaacatcgccgccggtggcggcaaccagcagagcaactccctgtccatcgccgccggttgcagcagctgcccggccggtggcgagagccttggcttctgatcctggcccaggggttccggcgccagccggaacccttttccatccgacacaggaaccggccatgcgcacgctcatcctttccctgctgctgctcgtcgacctcaccgcccaggcggcgaccctcggctttcccgccctgcccggcggcggcctggtctacaagcaggtgcagagcatccgcgagcggcgcttcgccgacctggtcgagcagaagaccgatttcagctgcggcgccgcggccctcgcgaccatcctggagaaggcctacggcgccccgctcgacgagcaggcggtgatccagggcatgctcgcccacgccgacccggagatcgtccgcacccagggcttctccatgctcgacatgaagcgctacgtcgaatccatgggcatgcgcgcgcgcggctaccgcatcgaggcggcgcaactggaacaactgaagatacccgccatcgtgctgatggaaatccgcggctacaagcacttcgtcgtcctgcaacgcacccagggcgagtacgtgtacgtgggtgacccggcgctggggcacaaacgctacgcgctgacagagttcgccaagggctggaacggcatcgtcttcgccgtgatcggccagggatacgaccgcggcaatccgctgctgacgccgcccgagccgctgaccgcgcgcaatcgcctggaccgcttcaaaccggtcagggacgccgaactgatggaattcggcttcatccagagcgatttcttctgatcgcaggagccggatgctccgggagcacgccatgtacacgcaccactgcttcgtcctcgcctgctgcctgggcgctgcgctgcccgcccccgccagcgacctcttcgcccccgccgaactgagcgaccaggagctttcccagttgcgcgggcgctacgtgctgccggggcggatcgtcagcttcggggtgaccatgagcagcacctggcagaacgccagcggccaggtcctcggcgcacgcgtcgacctgcaggtgcggcagaacctggcgcgcccggtcctcaacgtcaccctggtcgatcggccaggcgacgccccgccacccgtcgccggcaacggccaggtcctcggcggcgccggactggcgcagacccagggggtcagccagagcatccgcaccgccggcgaccacaacagcgccagcaatggcgtcagcatcgaggtccgccacggcgaggcgccgccgccactgccgggcggcacgccgctggaaggtgcgctggccctcagcggcgaggccggcacggtcaaggtcacgccgaacggcggcgccctgcaactggcgatccaggccagcggccagggcgccagcctgcaaagcctcggcgccggcggcctggtgcagagcgtggcgctcagcggaaaccgcaacctggtgcagaacctggcggcgctcgaggtgatgctcaaggaccggccgggcgccgatccggcactgaattgcgcctgggagcaattgcgcgcgctgcgccccagcggctactgaaagttgatctagtctgaaatcactgtgctatcggaaggccataaaaacggaacggcaaacatgacccagacactctcgctgcgagctgtcctctgcgccaccaccctggtttccccgttcctggcgcaggccgcgacggagtccgaggtcgaggcgctgaagaaggaactcctggagctgcgccaacgctacgaggcccagcagaacgccctgatggtcctcgaacagcgcgtgcgccaggtcgaggcgcaaccccaggcgccgcagccgcaacgcctggtcaagtcgatccagccgccggcgcaggcgcgcaacgacgccaacgcagtcgccggcacctacggcgccagcctcaaggacgatggcgcgcccgcgcccagcgtggaaaacatctaccaggacgccagcggcttcttcggcggcggcaccttcagcctggagaccggcctcacctacagccactacgacacccgccagttgttcctcaacggcttcctggcgctggactcgatcttcctcggcaacatcggcgtggaccagatcgatgccgacatctggaccctcgacctgaccggccgctacaactggaaccagcgctggcaggtggatatcaacgccccggtggtctatcgcgaatcgacctaccagtccgccggcgccggcggctcgacctcgcagatcaccgagaaatcggtgaccggcgacccacgcctgggcgacgtcagcttcggcgtcgcctacaagttcctcgacgaaagcgagagcaccccggacgcggtggtcagcctgcgggtcaaggcgcccaccggcaaggatccctacggcatcaagctgaagcaggtaccgggcaacaacaacctcaacgtgcccgacgacctgcccaccggcaacggcgtctggtcgatcaccccgggcatctcgctggtgaagacggtggacccggcggtgctgttcggcagcctgtcgtatacctacaacttcgaagagtcgttcgacgacatcaacccgcagcaaggcgtgaagaccggcggcaaggtcaagctcggcaactggttccaactcggcgtcggcgtggccttcgcgctgaacgagaagatgagcatgtcgttctccttctcagagctgatcagccagaagagcaaggtcaagcaggacggccagagctggcagaccgtcagcggcagcgacgccaacgccggctacttcggcctgggcatgacctatgcggtgagcaacaggttcagcatcgtgcccagcctgtccatcggcatcactccggacgcgccggactttaccttcggcgtgaaattcccctactacttctgaggggccaccgttcgagcctgggcatgccctacccctcgaagggatgcgtgagcctgggagcgatcctcgcctagctgcgcaggcgttatccgccggtagcaacggcaccgtccctctcaagcctcgccagcgagcgcccgctcgacttcctcgcgcgaggggatcgaggtctgcgcgccgaggcgggtcaccgagatcgccgcggcggcctggccgaaacggatcgccgccgcctcgtcgaggccgcgcgcaagggccgcggcgaagccgccgacgaaggtgtccccggccgccgtggtatccagcgccttgacccgcgccaccgggaaatgctcgacccgcccctcgcccaccagcagggcgccctgggcgccgagggtgacgatcaccctgccggcgcccatttcgcgcaggcgctcggcggcacgtccggcgctctccagggagtccaccggcaggcggcagagcagttcgctttcggtctcgttggggaccaggtagtccaccagcggcagccagtccgccggcacgtcgcgggtggccggcgccgggttgaggatcaccgtcttgcccagcgcatgggcccggcgcagcacatggccaaccgtctccagcgggctttccagctggcagaccaccacctgcgcctgctccagcaagtgttcgtggcgcgccagcacggccggggacaggtggccgttgccgccggcgacgatgacgatggcgttctggctgctgtcgtcgaccacgatcagcgccaccccgctggactccccggccacccgctcgacgccctggcagtcgatgccctcggcctgtagcgcacggtacaactggtcgccgtaggcatcgtcgccaaggcagccgatcatcgccacctccgcgccgagacgcgccgcggcgaccgcctggttggctcccttgccgccgggaacggtgatgaaggactgcccggcgagggtctcgccgccccgtggcaggcgcggcgcgcgcaccaccaggtccatgttcaggctgcccaccaccagtactttcgcttgcatcgttgcgtccttgttccagcctctctctagcgagggcgcccccggcgcccggttcagacccgcaccagcggcggcgcggtggattcgcgcaggaccagcgccggcgccaccacccgccgctgcatcggctcctcgcgctcggcgatgcgttgcagcagcaattgcgcagcgatctcgccaagcaggcggatcgactggcccacggtggtcaaggcgggaaacacgaagcggctcagctcgatatcgtcgaagccgatcaccgacagttcgtgcggcaccctgatattcagctcggccgcggcgcgcagcacgccgatgccgatcatgtcgttgccggcgacgatcgccgtcggtcgctcgccctcgccgcccagcaggccgagcgccgcgtggtagccgccggggctgctgaactcgctttccagcagccactgcgggcgcacctccaggccggccttggccatcgcccgccggtagccctcgacccgcagcgtcgagaccttggtcgacagcggcccgccgatgcaggcgatgtcgcgatggcccagttcgagcaggtggcgggtcgccaggtaggcgcccatctcatggtcgatctgcacccggtcggcttccacgccttccacctcgcggtcgacgatcacggtcggcgtgcgcatgttcgccagtcccttggccagcgcgccgtcgccgccggcggacgccaggaccaggccgtcgatgcgtttctcctggagcacgcgcaggtagttggcctgcttctgcgggttgtcgtcggagttgcagaggatcacgcagtagccgttgcgctcgcagcaatcctcgatgccgcgcgacagctcggcgaaatacgggttggtactgttcggcaccagcaggccgatgatcgaggtggtgcgcaccttcagcgagcgcgccaccgcgctgggcacgtagtgcagctgcgcgatggcgtcctcgaccttcttgcgcaccgcgtcgctgaccggccgcgtcctgttcaccacatgcgatacggtggtgaaggaaacccccgccatcgccgccacgtccttcattgtcgccatcgttcagccctgtctgcgggcgcgatggctgcgataggtatccagcaccaccgctaccacgatcaccgccccggtaatgattcgtttggtcggctccgacgcaccgatctgcgccagccccgccgccaatacggaaatgatcagcacgccgaagaaggtgctgaccaccgaacctcgcccgcccatcaggctggtgccgccgatcaccaccgcggcgatgacctggagttccaggccgaccccggcgttgggatcggccgcttccagacgcgagatctggaacagcgcggccaacccggcgagcagccccatcagggcgaatactgcaatcttatagggtttcgggttcacaccggccaatcgcaccgcttcttcgttggtgccgatgccgatcaggtagcggccgaacaccgtgcgggtgagcaccgcctgggcggcgaacatcaccagcagggcgatcacgaaggccggcgagatgccgaacgccagcggattggacagccaggcataggcgtcgccgatataggccgtgcgcgagtcggtcatctggtaggccagcccacgggccatctccagcaccccgagggacacgatgaacgagggaatccgccaggccaccgtgatcgaaccggtgacgcagccggccagggtcgcgcaggccatcccgagcatcgccgccggcagcacgccccagccccagccgagcgtcgccaggcttaccgccgaggccgccagggccagcaccgagcctaccgagagatcgatgccgccgacgatcagaatgaaggtcatgcccaccgccagcaccaccagatcggggatctggttggcgatggcgaggaaggtgccatagctgaggaagtggctgctcagcgccgagaacagcgcgatcatcgccagcagcgcgccggccaggccgaggtaggtgcccaggccgaaatagttgccgcgtcgcagggttggcgctgcggcggcggtagcggaagacgtcgggtcgctcatttctggttccttgcgttgcgtgttcacgacgtcgccagcagcgcgtcgcgtttcttgtaaccggcgaaggccgccgccagcagcgcgtcctgggtccaggcgtcgcgctcgaaggtgtccaccatacgtcccgccgagagcacgccgatgcgatcgcagatcagcatcagctcgcgcaggtcgctggacaccaccaccagcgccttgccccggcgggtcaactcggcgagcaaggcatagatatcgaacttcgcgccgacatcgatgccacgggtcggctcgtcgaacagcagcacctggcagtcgcgctccagccagcggccgatcaccaccttctgctggttgccgccggacagttcgcccaccgcctgcgcggtgtccgcgcagcgcacccgcagcgcctccacctggcgccgcgccagggcttcctcgcggcgccggtcgatcaccccgtggcgcgccagcgccggcaggttgcccagggcgaggttggcgctgatcgactggtccagcagcaggccctcgcccttgcggtcctcggtgatcagcgccactccctggcgcaccgagtcggccggcgaacgcaggctcaggcgctgcggcggatcgccgagcaggacctgcccaccgtcggcgcggtcggcgccgtagatcaggcgcaacaattcggtgcgcccggagccgatcagtccggagatgccgaagatctcccccgcgcgcacctcgaacgacacctcatgcaccttgccgcgccggctcagccgctccacccgcagcagcggcgcaccggtctgccgtgggcccaggtcgaagcgctcgcccagttcgcggccgaccatcagggtcaccagttggtcggcgtcgtagcgctcgatcggctcgacgcagaccaggcggccatcgcgcaacaccgcgatgcgctgcgaaatccgcgccagttcctccagtcgatgggagatgtagacgatcgccacgccgcgttcgcgcagccgctcgacctgctcgaagagcatgtccacttcgcgcgcggtaagcatcgccgtgggttcgtcgaggatcagcaagcggcagtcgccgatcaggttgcgggcgatctcgaccatctgctggtggccgataccgaggtcgccgaccagcgtgtcgggatcgatcgcctccaggccgacctgggccatcgcctcgcgggccgccgcgcgcaggcgccgacggtcgatccagccggcgcgccggggcaggtcgtggaggaacaggttctccgccaccgacagggtcggcagcaggttcagttcctgcatcaccatgcgcacgcccagcgcctcggcctcgcggcggctagcgggggcgtaaggccggccgaggagctccaggctgccggcgccgggacgttccaggccgccgacgatcttcgacagggtgctcttgccggcgccgttctcgccggtcagggccagcacctcgccgccgaacagttgcaggtcgatctccgccagcaccggctgcgcgtaggtcttgccgaccccgcggatgctcagcagcggcaatgcgtcgctagacatgggaaggctccatcggacggatcagggcgcggtcaccaactcgacaggcgtctcgaccacgccgtccttctcatgttccggggcttgcccagcaagcagcttgagcgcggtctggataccgaacaccgcctgcttcgcggcgaactggtcggcagtagccagcacccggccatccttgagcatcggcttgatcgcctggatattgtcgtagccgaccaccttcacctgcccggcgcggcccgccgcgcgcaccgccgataccgcgccgagggccatgctgtcgttgccggcgagcagcgccttgaggtccggatgctcgttgagcatcgccgaagccaccgcgttgcccttctcgatttcccagttgcccgactgcaaggagacgatcttcatccccgccgcgtccatcgcatccctgaagccggcggtgcgctgctgggcattggtggtcgtggagaccccttcgatgatgccgacctcgtcgccggccttcagtcgcttcgccaggtactcgccgaccagccgcgcgcccttgcggttgtcgggcccgacgaagggcacgccgatcttcttcgcctgcagcacctgcgggtcgaagcggttgtcgatgttgaccaccacgatgccggcgtccagcgctttcttcaccaccggcaccagcgccttggaatcggccggcgcgatcaccagtgcgtcgaccccggaaacgatcatctgctcgacgatgcggatctggctggaggtatcggtctcgtccttgatgccgttggaaaccagttcgaaccggtcggcatgctccttctggtaggccttggcgccgtcctccatggtcaggaagaactcgttcgccagcgacttcatcaccagcgcgatcctgggcttctcgggagtttccgcgtggacggcggacaggggcaggaacgaggaacaggcagtcagcacgacggcagccaacaggcgccgggaagcgacccgcttcatggtgtatcctccagcttttcttatcgttgtattgaggcttttccaggagattatccagacgcaaacgtttgcgttaggtgaatatgcgtcgatctgacagattctgtcaatcgccacgagcaactgtcgcgaaccggtcgggatcggttggattctagttcgctacggctgggaaacgcaggatattttgcctggctggcagatctcccgccgcccactcagcgcaaccggtgcttgtgcaacaggcggtagaaggtcggccgcgagaccccgagcatccgcgcggccacgctgaggttgtcgccgtaacgggccagcgcgtcgcacatcgcctggcgctcggcgcagagcttgtagacctccaggctggacaacggcgggccgtcgccgcgcgcgcattccaggccgaggtcctgggcctcgatctgctttccctctgccaggaccaacccgcgacgtacccggttggccagttcgcggacattgcccggccaggcgtgcatcgccatcgccgccagcgcgtcctcgctgaagcggcgcgggcggcggccggtctccaggctgtagagccgggagaaatgctgggccagcagcggcaggtcctcgctccgttcgcgcaacggcgcggtgccgacctgcaggacgttgagccggtagtagaggtcctcgcggaacgtcccggcatcgatcgccgcctccaggtcgacatgggtcgccgccagcacccgcacgtccacctcgaccggccggctaccgccgacccgctcgatctgctgttcctggagaaagcgcaacaggttggcctgcaactccagcggcaggtcgccgatctcgtcgaggaacagggtgccgccgtcggccgcctcgatccgcccgaccttgcgctggtgcgcgccggtgaaggcgcccttctcgtggccgaacagctcggactggatcaggtgctcgggaatcgccccgcagttgatcgcgacgaacggcctgtccgcgcgccgcgactgccggtgcagggtacgcgcgaccagttccttgccggtgccgctctcgccccggatcagtaccggcgagtcggtcggcgccagcttcgccagcagccggcgcaggtcgcgtacggccaggctctcgccgagcagttcgtgctcgccctcggcatcgccgggcaccgtgccgcgcccgcgcaggcgggccatgccaaaggcgcggccgagggtcacctgcacccgcgccatgtcgaacggcaaggtatggaagtcgaagaaccattcgcagacgaaatcgccgacgccattcaccggcagggtgtccgggctgagcacggcgatccactcggtgccgctgcggctgatcaggtccttcaccgtctccggccgctccaggtggaacggccgcaggcgcagcaggccgacgtcgcaagcgcgttcgcgcgccgtttccagcgcgcagctgtccactgcccaacccgcctcgcgaagtcccggcaacaggcgccggcaatcgtcgcacgggtccaccaccagcagacggcggaggttcgatgcatctggcatgtgtgctcctttgcggcgccaattctttgaaccgtcataaaaacggcatgttggcgctctgaaaggaaaatctagcaattttttgacgcgcgaaagtgaatctttgtttatatcgccaatgccgaaatcgtcttatcagtcgtagccgcgacgcttgacttccaggcgccggacgaactcctccaggaccagcttgtagaggtcgtcgccgaggtagacatcttccaccccgcagtcgatgttcgggttgtcgttcacctcgatcaccaccaccttgtcgccggcctgcttcaggtccaccccgtagaggccgtcgccgatcagattggcggtcttcaccgccagctccaccaccttgcgcggcgcctcgtgcacgggcatggtgcggaaatcgccgctgacctcctcggcgtccgggctgtggtcgtagatctgccagtggcccttggacatgaagtactggcaggcgaagatcggcttgcggttgagcacgccgatacgccagtcgtactcggtatagaagaactcctgggcaaggatcagcaccgagcgctcgaacagctcggcgctggccgccagcaactgctcctggtcctccaccttgatcaccccgcgcgagaagctgccgtcgggaatcttcagcaccagcgggaagcccaggcgctcgccgaccttctccagttcctgcgggttctccttgtagagaatctcggtggccggcatgcccagcttgtggctgcgcagcaggtcggccaggtacaccttgttggtgcagcgcaggatcgacaccgggtcgtccatcaccaccaacccttcgctctcggccttcttggcgaaacggtaggtgtgatcggcgacattggtggtctcgcggatgaacagcgcgtcgtactcggcgatccgcgaatagtccttgcgctcgatcaggtcgacgtcgatgccgaggctgcggccgacccgcacgaagttcttcagcgccttggcgtcggagggcgggaacgcctcgccggggtcgtggaggatcgccaggtcgtagcggaacggcttgcgcgaacgcggcttgcgccagatctgccggctgaagctgtccagggcgttggcgaagaggtcttcctggtcctcgcgcagcttgtggatggcgccgggcttgatgccctcgatgtgccaggtgcggttgcgcttgaactccaccagcagcaacgggcagggaaacgcctcgaacagttgtcgcgcaaggtcctgcagcggctcgatgtcggtacggccgaaatacagggtcagggtgaaaccatcggtgctgccgtaggggtgcgcggccagggccttgtccagggtgcgatccagatcttccaggaccaggctgtacagcgacttcctggccagctcgctgatcgtccgcaccgaagggatcaccttgtgcccgcgcgcctcggcgagcagcgagcagtagtagccatggcgcaggtacttgtagtgccggcacaggttgatcacctggacccgcttgccagtgtcgtcgtcgatgggcagttccaggtattcctgggcggtgaccacatcctcgctggggtaataggacgtccagtcttccttgcgttccacgatgatgaacagcttgctcacgacacctcccggggtgacagcgaaaccacggcgcattcggaaccggcttgccggcgcacgcatcccggccaatactcggcgggaatcccttgcgaaaccgctctatggcgcctgccagcaaaccgaagcgtacagcacccattacagcacgcccgcgcggaagttcccgcccgcggccgtggagaccgctatgaacctgaccctccgcccggccggtgtggacgacctgtccgccctggtcgagctggaaaaccgctgcttcgactacgatcgcctgtcccgccgcaacttccagtggatgctcacccgcgcccacgccagcctgacggtagccgagggcgacggcggcgtgctcggctacgccctggtgctgttccacgaaggcacctcgctggcccgcctctactccatcgccatcgacccgcgcgcccgcggcatcggcctcggtcagaagctgctggaagccgccgagcaggccgcgcgggacaacgaccgcgcctacatgcgcctggaagtgcgcccggacaaccgtggcgccatcgccctctacgagcgcaacggctaccgtcccttcgccaccgtgcgcgactactacgaggaccacagcgaagcgctgcgcttcgagaaacgcatccgcaaccccggccacgaacagcgccgccacgtgcccttctaccggcagaccaccgatttcacctgcggcccggcctgcctgctgatggccatgggcgcgctgcaaccggaacgccagttgacccgccgcgaggaactgcgcctgtggcgcgaggcgaccaccatctacatgaccgccgggcacggcggctgtagcccccagggcctggcgctggccgcctggcggcgcggcttccgggtcaagctggtgctgtccgccagcggcccgctgttcctcgacggcgtacgcaacgaagacaagaaggcggtgatgcgcctggtccacgaggacttctgcgaggaactggacgcctcgggcgtcgagcagaagcgctcggccaggctcgacatcccgcgtcagctggcccggggcggccagccgctggtgctgatcagcagctaccgcctgacccgctccaaggccccgcactgggtgctggtcacccactacgacgaggacttcgtctacctccacgatcccgacgtcgaccacagccagcaccgccagccgctggattgccagcacatcccggtaagccacgccgagttcgacaagatgagccgcttcggccgcagcaagctgcgcgcggcggtgatcctgttcaacccggaatgatccgcatcgccccgccctgcggcggggagatgttctcgcctatcaatcaattccatcgatagtggctagtgagactatccatttttcattcgccaacgccgatgtttacatagtcgccagatccccgaataaccagaacggaactggagacgacaccatgagctactccgccaaatccttctcggccctgatcaatgccatgcgcgccgacggcatcacccgcctggaacaactggcccgccagcccttccgcaacgcccagggcttctggagcgcggaggcgaagaaatgaaagccctgctcgaccgccgtaccgatcccacctggatgctctacgccgcaatcatcgcctggctggccttctccggtctctgaccggcaggccaccggcgcctcaccctgccgttccacgacgctccggcgtccgcctttctccggtgaaataccgagctttcgtcgccaacatcgccaggcgaggcctgcgcaaacgtttcacccgttcgctgtcaagaaaaccttgtcaaaaagctgatagcagcttgccaatatgccaacgccttggcataacggtgccaaaaaaaggcctacaaggacgttcctgatgcgcaccgtgaaaaaggctctgctggttgtcggcgtgatcgtgctggcggtcgtcggggtggtggtctactacgtcgccaatcccaacctcccccactaccaggcgccgagcgaggtacgctacctgccgcaatggcaggacgaggcccgccagcgcttctactacacgccccagggcaccctggtgaaaggcctgcactacgactggttcaccgccctcgaactgcccttctccgaagaacccttcgccgcccccgaatacctcgcccgcttcggcttcctcgtcgatccgcagcagaaggccagcgacctcaaccccggcaacctgccggtgggcttcagccagcaccgcgacgagaagaccggcacccgctacctggacatcacctgcgccgcctgccacaccggcgaactgcgctaccagggcaagtcgctgcgcatcgacggcggcgccgccatgcactccatcgccgccaccgtgccgaccctgcgcggcggcgccttcggccaggcgctcggcgcgagcatggccgccacctactacaacccgttcaagttcaaccgcttcgccaggaaagtcctcggcgaacgctacgaacaggacaagtcgcaactgcgcgccgacttcaaggccgtactcgacaccctcctgcgcaccgcctggaacgacacccgccgccacctctaccccaccgaggaaggccccggccgcaccgacgccttcgggcgcatcgccaacagcgtcttcggcgatgccatcgacccgggcaactaccgcgtcgccaacgccccggtgagctatccgcaggtctgggacatctggaaattcgactgggtgcaatggaacggctcggccatgcagccgatggcgcgcaatatcggcgaggccctcggcgtcggcgcgcgcctgcagatcttcgacgagcacggccagccgctgcggggcgagcagcgctacgcctccagcgtacgcctgcacgacctgcacgccctggaagaaaccctgcaacaactgaaaccgccgacctggccggaagacctcttcggccgcatcgacctgcaacgcgcctcccagggccgcgccctgttcgaagccaactgcgccttctgccatgcacccaaggtgcaaccggcggaatacgccgcccccggacgcaatcccgagtggcgcatgcacatggtgccgaccgaggtgatcggcaccgacccgaccaccgccgacaacatcgccgaccaccgctacgacctgcgcaagctcggctggagcgtcgacgaactggcgcggatgaacgtccagctgatcggcgccgatccgcagcaactcgacctctcgcaactgtcctcggccaagggcctggcctacatcaccgccttcgtcgagcagcgcgcctaccgggacgccggcatcccgccggaacagcagaagaccatgaacggcttcgacctgccgatcggtgtacaggaactgcgcgcctacaaggcccgcccgctggacggcgtctgggcgaccccgccattcctgcacaacggctcggtgcccaacctgttccagctgctctccccggccgccgaacgctcgccgcagttctacgtcggcaccttcgaattcgatccgaaattcgtcggattccgcaccgagaaattccccggcggcttcctcctcgacacccgtctcaccggcaaccgcaacagcggccacgaattccgcgacggctgccggcagaacggcgtgatcggccgcgccctcagcccggaagaacgctgggcgctggtggaatacctgaaggtgctcggcaaccccgaattcgagcgccgcctggtcccggcccagaccccaccctggacgcccggcccgaaatgcccggcgccggagcaacggaccgcgcaacgctgaacctgggaaatggagaagcgcgaggcatggcgccgccgcccctctccaccccgagcagcccctctcccttcaggggggacgcctagccagaggacggggagaagcaatcgtggcgcactccccgcccaagaagaataaaagcccacagccaacgcacaccaccaaggacacccactccatgcgcgcactcctcacccacgcctggctgttcctcggcaaatggctcggccgcctgctcctcctcctgctggccgtcggcctcggcggctgggccatcggcagcctctactacgcctggaaattctccggcccggtgtccgcggaagagcagatcgccccggacgaagcccgcatcacccaggcgatcatccaggacgccatccgcgtggtcgaacagcaccgcgacaacacccgcgtcctgcgcgatgcccacgccaaggcccacggctgcgtgaaggccgagttcaaggtacgcgccgacctcgacccgaccctgcgtcgcggcgtgttcgccgaaccgggcaaaagctggaacgcctgggtgcgcttctccaacggcaacgcctacccgcagttcgacagcaagaacgacgcgcgcggcatggccatcaagctgctcgacgtgcccggcgaaaaactcctgcccggccgcggccatgacggcgagcaggacttcgtcatgttcaaccagccggtgttcttcatccgcgacatcgccgaataccggcaaaacttcgccgcccaggccgacggcaagaaagccctggccttcttccccaactggaaccccgccagctgggaactgcgccacctgctgatcgccctgcgcaccctcgcccccgccccggacagcccgctgcacgccggctacaacggcatctcgccgtacaagctgggcgaacacaacatcaagttccgcgtcgtccccgccccggagaagtgcccggcctaccagctaccgaagcagaaccaggacctgcccaacttcctccgcgccgccctgtaccagcaactctccatcgaccgcacccccgcctgctacgccttccaggtgcagcgccaggacccggccaagtacatgcccatcgaagacaccagcgtcgaatggaaggagtcggacgcgcccttcgctaccatagccgacatcattgtgccagctcaggatttcgatagccgggaacagaacctgttctgtgacaacctttcgttcaacccctggcacgcgctgccggagcatcggccgatcggcgggatcaaccggttgcggaaggcggtttacgaggcggtcagtgggtataggttggggaggaatgggtgagggtttagggggaggagtgcttggtgttacgttgatcgggaatggccagaatcggccagaaacggccattcgatcaacgcgctttcaggtctatcaagcacgtggcgcgtcaccgttgagcaccttaactagaacgcgttcctaccgattgatacacgaccatcaacttacagtgtctggcaggtgacaaatgagctgagcagtactgcatcttggaatgcggagccaacccatactggctctgagtcgcctgcaggctgccaaacgctatatgaagaacccacaaggctgtggagcaggcattggcgtgatagtggcaagaggctattctcgcgtcgagacgaccatcataagcttctgcttgatacctctctttcatttccagcgtctaggcctacatttagaagattttttaaaaggaatttattatgaatatgcctgaagaaaaaataatctctaaagattctgctcagtcatctctgcaccagatgatcgtattgaatgcgattacggcagatctatttaaagctcagaacggagcattgacatattacgatgcgaagataggaaaaaactgggatctcaaaaaaaataccgcattggattttgttaaagtaatcgagagaaagtttgcgaaaaataacaagtttcatggctatttctctcccaagaaccagcacatggctccagtagttctgcaggagttcgtagatggaaagatccgcttcgagcaactggttaaggcttttgttgataatgcctgtgatgaggctaacttaccaactcgtgggactttgactttgggtcacttggtaatggttcattacaaaactcagaatgacgctgatgatgtcggtagatttctagctgtgcttgtgggcaagcaagatggattcgatttcgactctgatctccaaccagttgatctaacaagtattaatactagcgagcttcgccacgctgcaatgtttgacttgaccctattcaaagagacctttcccaagaatgacggagatgcatatctaaagtttattactggaaaatcgaaaagtgcatttctgaaagacgccttcgggtgttccgatcacatacctaatcgagatagtgtggagcaagtgcgtgccgccgtattggatttcttaaatgatccatctatcccagagtcgcggcgtctaaagatcgtagatggtgtgactatgcatcttgtggttgccgctaaaagaaatatctctgtctccattcaggatattcagaaagtaataaatgactctctacctttggggtcaaataagattgatggttttagtggttttgtaaatgatggtggctatacgattagtgaaagatttcagccgacccgtataagtgcacagcttttacagaacgtggagattgctgatcctcaagctggctttaaatgcagtattaatattcagtctattagttatgctgacgctgaagatagaaaaatcataacggtagatgaagaccttacaagtatcaacatacctctcactccgcaggcgcgagaggtcattaagaagatactcggtggaaagggagaattagatcagcagcgaacagatacggtcgacactgcctctggtcaataaagggaagtaaatagacgagataggccagcaatatgagactggttcatatttatataggtgaacataagggtgttcgggatctaaatgtttcccttggtggggaaacggtgtttcatgttgacggtcagactcttagtgttgagcatagggttgacacatccagatattacaatgggtatcactgttctgcgattattggggctaatggggttgggaaaagcacgattctggactttctagagtctgtgtactttccaatagactccagcggggttcttattttcttggatgaaaattcaagaattcacgtttgccaagtcaactaccatatactccattgctctgtccagttcgaaaggtatgatgactatgaggtttttgcgaaactctttaagactgtcttggttaaaataaataatgtatctgccgctcagtctagattaggatacgaaaggaaacataaccactctctgattcaagagagatccttagagcactacaccacgggtgctagtcgaaagaaaatgtactttgacaacttgcttgattacctaaggtggaatcaatcgagcagaaatgttgttcaggatgttggttttgaattcagatttcaaaactcatttaagcgcatggcatctttggttagacctgacgtgtactatcctggtcgccgggtggagctggagaatgcctacaacactattcagaagagtagaaagctactgagtccaagtagtcaaaaggatatatttgagcttctggtggcagcgctatctacatcaattatcgttgagcttgcagcaagctcaggcgctgcgcgcccagaagttctggctgtgctgcagttgcacttcatcagtgcgcttgctgtcggggatttaaattttcgtcgcagtatttcacagtcactagaagctctaagatacgacgaaaactgggacgtatttgttaaagacaagcaaggcaatagctttaagtctgttaattcaatagacgttgacattaatagaatgcaagcactttactctgaatatttagaggcccttcgcgacatctcagaaatcttagcttcaggtcgtcgtatatccatcgatgaaagcggatctttgattgttttggtagatcaattttcttttgctagtaaagtggtttatttgtcgacaaggcttccgagaaatatcctttcaaatataaattgggggtggagggggattagcacaggggaaatggcttacacccatcttttctccgagacatataattgcgcaaagaagtcaagaaaagcaaactatataatagtaattgatgaggccgatctttatctgcaccctgagtggcaacggggctttcttgactcctatcttgggttgctagataggttggattggaaaggcgcgctgccacagataatcatcactacccactctcctattattgtaagcgattttttacctcaagatattgtgtcattagtaaaagacgctggcggcaaggttgagattaaagagtcgcttggctttggaaccaatattacaaacttgtttattgatggaatgcaccttactgccacggtcggcgagcactcgaggaaagccatcgtctcgcttgtagaaaaatccgaatcccaaacattaagctccttggataaggcgctaattaaagggatgggcaacaagtttgtcagggagtaccttttgcaaaatgattaagttcgaattcctgcctagcgccgaccttaaggccaagtacgatcttcgagttgtttcgaaggctcagcagaaaatgaatgcatatattcatgcacttccaatagagcatcaagctagatttagctattttgatgacgccaaaataaatgagatcctaaattgcctgccaggcgatatccttggtcatatatatgatatttatggaaggtttccagaactagcagatagatattggccggcatacttcataaaagatgcgcccatcccggcgggtgtcgataaaaatggcgctcaaacacgtgaagagaaggctgttttagatgagctatcggagcaggctatcgcttatttagagcccatcgctgcgccggagttgacttacataagccatttgttgatgtcgcttaaaggggctgtaacttattccgctaaaagagaaattctggcgaatatagttaaggctgcgcggggagaaaatatagcgacagaaaaatttaagaagatctttgatgattggattaacagttttgaggatgtctttagctactcagcgctatccttagacattggtcatgacataactgatgaatggaaaatacatgtttgcttgtattgcaatgatgaacctatacagacaaaagggagtcgcgtgagatttagaacagatctcgatcatttctatccaagaactaaatttccatttttggctgtgacactatctaacttggttccggctggcaagacttgcaatcaatcctataaaggaaataaggatatgattgagtatgagcatccttttgtcaggggcgtcggtcagtcccgtgtatttcatctaaacactccatttggcaagataatcacagaggaaaatttctccgttagtgttgtggagcagggtggaaaattagatttgaatttgtccgaattcgagattgcccataactacgaaaatagtgatgaaattaagacttgggtagctgatgcggcgggtacggtcgagctaattgttgggtgcaatagtccgcaggtgaaagctgcgttgttgagaggcttaataaaagctgacaaaccatctcatcgtgagcggcacaagaaattcaaggctgattcaattaatcagtttgctggcaaagagattgtttcgttcttctaagagagaatcgccaagacggatcttagctcagcagggtaaagatttcatatagaacgatatctactctagcatgatgcttttacttgtctcgcttgagcatatcggcaagtgcttttcgcaaataacagcatcgtaatggcagttggcaactcctgcacccacccaatccaatggatcacttggctttgtttttgcattcgattcttgaaggcttggcaatgaagatgcatgcctagtttctttgtaagaattgcggcgaagattgtcttgtagtcctcgaagttccaactctcaaagttgttcaaagactctgtatagagtttctgcctggaaaatctattgctacagcgcggctgcgttgacttctttgcggacggccgcttttggccgattagcgaccgttgctatggctggtccacccttgtcctccctcacatggaggacaagccatgaactgtagtggtcaaccctctcccgcacgcgggagagggggccgagcgtgccttgtgggtcgagcgcctcgctcgggcgcagcctggaacgatgtctaccctcccctaggccccgggtatctggaattcggcccccagcccaggcaaccagaagcaccggaaacgcgccctgaatgatttcagattcgcgccgaaaccttcgaaagccgtttcctcgcacccgaaagccgccgaggctgccctgcggctttcgctgcgcaacggctacccgcctacttgcaccggtcgctcagcctgaccagcgatgcgccgtacaccgcgtcgtcctcggaggcgaagatcgcctcgccttcgacggtggcccccggcttgagggtctcggcggtgagttcctcgtccacggtatccagcctgaaggactggccggcggcggactgcgccaccaggcagctgttcttcaggctgatctcgctcttcgccgcattcaccaggcggaccttgaaggcctgggtgcggaagtgcttgtcgccgacggatacgctgcccttgtcgccctggcgggcgaagaccatcactgcgtccggcgcggcggcgaagccgagggaaggagcggccagcaggccggccagggtcagggccattgcgttcttcatactgatttcctttggcaaagactgaacgacccggtgattttccgtgggtcttttcgccgcgatcaagcgcagtgccaaggaatgcggggcgcctcgtgttctgcaagtcggagggtttccagcggaacttttcccgcaaccgtgcttccagccgaaaaccgctcgctacgcggagcgccggtcttcggccccacacgatcctcgcgcccgccaggctgccctcgaacacttgcaaccacaggccggacgctcggcccaggcgatggcccaatgggcgccgggcaggtccgcttcggcgtggccgcgatgcaacaagtgcgcctggaccggcatcgcggtagcgctcggcgagggcgccaccgaagctgtcggcggcatgtcgtgttcgactccgttgcgggtggcgagcggggcctgcgatcttcccttgggggagagtccagcccggcgacccggcaggtggccgccaagccgcttgcgcaggctgccgggctcagccgagcaacttgtcgacggtcagcgggaagtcgcgcaggcggcggccggtggcgtggtacacggcattcgccactgcggcggcgacgccgacgatgcctatttcgccgacgcccttggagcccagttcgttaacgatatcgtcgggttcgtcgacgaagatcacctcgatatcgccaatatcggcgttaaccgggatgtggtactcggcgaggttgtggttcatgcagcggcccagcgcatggtcgacctgggtttcctcctgcaaggccatgcccaggccccagaccaccccgccgagtatctggctgcgagcggtcttcgggttgatcacccgccccgccgcgaccgcgctgaccacccggctcacacgcagggtaccgagggcttcgtcgatccgcacctcgacgaataccgccgaatgggtcgcggtggcgtagcctttgcgccgcgccgagggttcagcttccacctccacctgcaacgcgtcttccggcagcccttgcagcaggtcggccagggcgtatcgcgtatcgcccgcttccagatggccacggcatatgcggaagcgttcttcggcggtgccggccagctccggatggcgggccctggcatgggcgaccagggcctggcgcaggcgcaggcaggccaggcggacggcggaaccgaccgacgagacggtgaacgagccgccctgcaatggagccttgggcaacgcactgtcgccaagctggaagcgcacctcttccggcgccatgccagcggcgtcggcggcgatctgggtcatcaccgtgtaggtgccggtgccgatatccgtggtcgcgctggccacccgcagcaggccgtccgcctccagccgcgccctggcgctggccttgctctgcatggcctcccagacgccgccggccatgccccagccgagcaactggcgcccttcgctcatgctccgtggccgtgggtcgcgggcctgccaaccgaagcgccgggcgccctcctcgtagcaggccagcagcgccttgctggagtacggcttgtcctcgttgccgttgcgctcggcgaagttgaaccggcgcagcgcgatggggtccatgccgagccgcaccgccagttcgtccatcgcgcattccagcccgatcagtcccagcgccgcgccgggggcgcgcatgtccagcggggtatagacgtccagcggcaccagacggtaggccagggaaaggttctcgcagcgatagagcatgccgctccactccaccacgtgctcggtgaagtcttcgaagcgcgaggtctgcgctgtcgcctggtggcccagcgcaagcaggcgcccctcggcatcggcgcccagttgcaggcgctgcagggtgcgcggccggtagccgaaggtgaacatctgctggcgggtcagcactacgcgcaccgaccgccgcagttgcagcgccgccatcaccgccagggccaactggtattgcggacgcaggccggagccgaaggcgccgccgacgtaggcggcacagacccttaccttgtcggcgggcaggccgaagaccttttgcaggtaggcctggctgttctgcgtcccctgggtcttgtcgtgcaccagcaggctgccgtcgggctggacgatgaccgtggacgcgtgcggttccatgggattgtggtgctcgatcggcgtgctgtagctggcctcgacccgaatcggcgcggcgcggtaggcggtgtagaagtcgccgcgctcggcgggcagttcggcgggagcctcatgggcctggtcgagggcgaccagcaggtcggtctggtgcggctcgggctcgatgtcgatgcgcagcagcgagcccgcgtagcgggccagttccaggctccgtgccaggaccagggcaaggggctggccgctgtacaggacgcggtcgtcgaacagcgggcggaagggttcgccttcggcggcatcggcgtccttgtagggctcgtcgtcgcccgccatcggcggccggttcaggtgatgcagtaccgcgaccaccccgggtaccgccagggccgccgcacagtcgatgccgcgcacccggccgcgggcgacgtcgctgctgaccacgctgccgtggagcaggtcggcggcaggatattcggcggcgtagcgagcctggccggtgaccttggctggcccgtcgacgcgatccagggcttgcccggtgctgtgtggcaggctgctcattggccgatccctcccgagtgggcttcttccagtgcgcgaacgatggcgttgcgcgccaatccgatcttgaaggcgttgtgggccagcggcctggcgtcacgcagcagcgcttcggcgaagcggacatagctgtcccggttcgccgggtggcccctgaaacgttcctccagctctgcgacgcgccatggcttgtgggccacgccgccgagcgccaggcgcagttcgccaatgcgctcgccgtccggttccagggccgccgccaccgagaccagggcgaaggcgtaggaggcccggtcgcgcaccttcaggtagtggcaatgccgggcgaagcgcggcgctggcagctcgatggcggtgaccagttcgtcgacggccaggcagttgtcgcgctcgggcgtgtccgccggcaggcgatggaagtcggcgaaagcgacccgccgctcgccagcgcggccgcgcaccagtacctgagcctccagcgccgccagcgccacgcacaggtcggatggatgtaccgccacgcagtgttcgctggcgccgaggatcgcatggttgcggttcagcccgctgcgcgcggggcatccactgcccggctcgcgcttgttgcatggcgtgccggtgtcgtagaaatactggcagcgggtacgctgcaacaggttgccgccggtgctggccatgttgcgcaactgcggcgaggcgccggcgaggatcgcctgggctagcaagggatagtccgcctccacggcgggattccaggccagttcggcgttgctgaccagggctccgaccagcaggccgccggtgggcgtccggcggatgtcgcgcagcgggaggccggtgatgtcgatgagtcgccggggcctggcaacgttttccttcatcaggtcgagcaggttggtgccgccggcgatgtagcgcgactccgggccggcgaggcccagcgcctgctcgatgtcggccggcttggcataggcgaagggcgtcatgcgcgctgccctccctgtccgtcgcgatcgagcagcggcaaggcgtcttccacagcgtcgaggatattgccgtaggcgccgcagcggcacaggttgccgctcatgccctcgcggatctccgcccgcgagcgcgcccgcccctcgctcgccaggccaagggccgaacagatctgtccgggcgtgcagtagccgcactggaaggcatcatggcggatgaacgcctgttgcaggggatgcaggcgatcaccctcggccagaccttcgatggtagtcagtgcatcgccgtcgcacatcaccgccagcgtcaggcaggcgttgatccggcgaccgttgcgcaacaccgtgcaagcgccgcattggccgtggtcgcagcccttcttgctgcccaccaggtcgagccgctcgcgcagcaggtcgagcagcgtcagccacgggggtactctcagctctcggcgctggccattgatcagcaggctgatcggcaggtccgccggctccggattggtcatggtacaagcctcacggtcggtgcatcggcgcggcggatgccgctttttcaggtccgaccgaacggctcgaagatacgttcaaagtaaatgacggccatggccatgccacaaaggcgggcggatgctcgacgcctgcgccgctatcggccgccggagccctgcgccgaggtcacttgaacaggctcgacaccacccgcgccacgtgctcggcgcccttgctgatctcctgcatgatgccggccacggtggtgatctggttgttgttctcctgggcgctggactcgatggtctgcatgttgtggttgatctgctgggtcagcttgacgttctcggtgaccacgttcttgatctccaccgtggcgccgctggtgcgcgccgccagttgccgcacctcgtcggcgaccaccgcgaagccgcgccccatgtcgccggcgcgagccgcctcgatggcggcgttgagggccagcaggttggtctgttcggcgacgctctggatggtggtgacgatgttctcgatatccttggtctggtgggtgagctgggaaatcaggccgacggcggtgttgaccatcgacagggtcttggccgacagggcgacggactggtcgagggagtcgatgccgcgggtggaaatctgcgcggtctcttccgcggtggagaacgacagctcggcggcgcgccgtacctcctcgttacgattgacctgctcggtaacgtcgatggcgaacttgatgaccttgattatccgccccgaactgtccttgaccgggttgtaggtggcttcgatatgtacccgctcgccggcggcgctgcggcgctcgaaatgcccgcgggagaattcgccgtgccgcagccgagcccagaaatccgggttctcccgatagaactcgtcgaagcagagcatgcggtggtgctggcccttgagcgacttgaggctgtagccgaagagacgcaggaagttctcgttggcatcgagtatctcgccgtccggggtgaactcgatgaccgccatggactggcgtatggcgtcgttgatcgcgttgagcaggagcagttcggaatggttgcgggtcacgtcggcggcgatcttcagcacctcgacgaccgccccttcggcattcttcaccgggaaataggtggcctccagccagaccggcgaaccgtcgcgtcgcaggcgcttgaacacgccgcgctggggcgtgccgctggccagttccttccagaagcgcacgtaggcggcagaggcctggtagtcctcgtcgcagaagatccggtggtgcttgccgaccagttcgtccgccgaatagccgaccgccgcgaggaacagcgggttggcggacagtatctggccatcgggagtgaatcggatggtggcgacgttctgcccgatggcctcgagtcgccacgctacatcttcatccttggcggcgctttcgaccgccctgctttttctgccgaagagcatcgcgcacgactccttgatggcacctgtccatcgcgagggagtggagaaccggagatagtcgtcctgccgctacacgccagtgtagatcggggtccggcaattttcctcggcgcccgcggcaccgtccgtcccctgccgggcgtcgcccgcgtccgcgccatcagccacgcaagcgccggcccgcgctatgatcgctacgccctgccgatcgcggtggccaaggccggcattggccagaggcgcccggcctgaccgcgctccgaccgcgcgccgtcgtaccccgaaccccacctccaggaggaagcacatggcaaccgatctctacgcgctggccgaacaggtcgaggacgaagcgggttacctgcgcttcctcgccgcgctggcggcggactgggaggaagaccgccgcctcgccgccaccaacccgccgaagccgttcggccccagcccgctgggttgggagaacggcagcatcggtggcttcctcgatgccgccgcgacctggggcgaggactcccgcgacggcctgccgggctattccaggccggagaatgcctggcggcgcgcggcgcagctgatgctggcgggcaagttctatgaatgacttcaagtctgccctggcgcccttcccgcccggctacccgagggtcttaccgggcaaccggcggcaggtgccgatattgcatcgcgacgcggacttcctcctgcgcgcgctgcaacccgacgatttcgtccggaccagccgctacgagaacgccaaccgcgagcacctggcgccatgggagccgctgcgcgacccggggtatttttccgtggacaacgcccgcgcccgcaccctgctacaggtggcgagcatggacgaaggcgaggcgcttctcctgctgttgctcgatcccaacgacggcgaggtgctggggcgctgcagctacaccaacatcgtccgcggggtattccaggcctgccacctgggcttttccctggccgctgcggctcagggccgcggcctgatggcgcgtgccctgcgggtagccaaccggtattgcttcgagcagctcggcctgcaccggatcatggccagccacctgccgcgcaacgcacgcagcgagcgcctgctggaaagcctcggcttcgagagggagggctacgcccgcgcctacctgaagatcgccggggtctgggaagaccatgtgctacgggcgctggtggacgctccgcgctgaaccgacgtgcaaacgcggaacgggacgccaggcgtcccgttccgctcaccaggcccgccggtcaaccgcaggcgaggtcgccacgcagttcgcgggcagcggcgaccatgttcaccagcgccgcctcggtttccggccaggcgcgggtcttcaggccgcagtccgggttgacccagagccgctcggcgggtatccgccgggctgccttgcgcagcagcgcgacgatctcttcccggctcggcacgcgcggcgaatggatgtcgtagacgcccggaccgatctcgttcgggtagtcgaactgctcgaaggcctccagcagctccatgtccgaacgcgaagtctcgatggtgatcacgtcggcgtccatggcggcgatggactcgatcacatcgttgaactcgctgtagcacatgtgcgtatggatctgggtttcgtcgcggactccggaggcgcacaggcggaaggcctcggtggcccactccagatagtgcggccaggcgttgcggcgcagcggcaggccttcgcggaaagccgcctcgtcgatctgcacgatcctgatgccggcggcctccaggtcgaccacttcgtcgcggatcgccagggccaactggcgcgcctgcacctcgcgagacacgtcctcgcgcgggaaggaccacatcagcatggtcaccgggccggtcagcatgcccttcatcaccttgtcggtaaggctctgggcgtacctgatccactccacggtcatggcccgcggacggctcaggtcgccatagatcaccgccggcttcacgcagcgcgagccgtagctctgcacccagccgaagcgggtgaagacgtagccgtccagttgctcggcgaagtactcgaccatgtcgttgcgctcggcctcgccgtgcaccagcacgtccagccccagttgctcctggatctgcaccgcatggcggatctcgctgtgcatcgcctcgatgtactcggcctcgctcagcttgccctgcttgaacgactggcgggccaggcggatcgacgaggtctgcgggaaggagccgatggtggtggtcgggaacgccggcaggtcgagtccggcgcgctgcctggcgatgcgttcggcgaacggcgagcggcgctgggcgtcgctggccttgatcgcggccaggcgcgcctgcacggccggcttgtggattcgcggcgaagaagcgcggctggcctggaccgcacggctctcttccagggcggcaagcacctcggcggcctccggctcagtggcggcacgggccagcaccgcgacttcgcggcacttctgcacggcgaaggccagccagctcttcagctcggcgtccagcccgtcttcgcgctccaggtccaccgggctgtgcagcagcgagcaggacggcgcgacccacagccgctcgcccaggcgctcccgggcatggcgcaccacttccagggctttctccaagtcgcagcgccagacgttgcgtccgttgaccaggcccagcgagacgaccttgtaggccggcaggcggtcgaggatgctcggatactgttccggcgctcgcaccaggtcgatgtgcaggccgtccaccgggaggttggcggccaggcccaggttgtcttccaggccgccgaagtaggtggcgaccagcttcttcagcggttcgctctgtagcaggttgtaggcgcgctcgaaggcgttcttccatgcctgcggcaggtcgaggaccaggatcggctcgtcgatctgcacccactccacgccctggccggcgaggcggcgcaagatctggccgtagagcggcagcaggcggtccagcaggtcgagcctgtcgaactcggcgcccttgcccttgcccagccacaggtaggtcagcggaccgatcagcaccggcttcacctggtggccgagggccctggcctcgtcgacctcctcgaacagttgttcccagctcagctggaactgctgatcggcgctgaactcggggaccaggtagtgatagttggtgtcgaaccacttggtcatttcctgggcatgggcaccgccgcaacaactgtcgtcgctgacgccacgggccatgccgaacagggtatgcagggtcggcccggcctcgccgtgcgcccggaagcgctcggggatcacgccgaaggtcagcgaatgggtcagcacctggtcataccaggcgaaatcgccgaccggcagcaactggatgccggcatccttctgtacctgccagtgggcagcgcgcagctgccgaccgacggcccgcaggccggcctcgtccagctcgcccttccagaacgcttcctgggcttttttcagttcgcgatcgcgtccgatgcgtgggaagccgagagtgtgggccagggccatgggtgttcctccagtcgaaaggtcgatggaggaattctcgtgaggctcatgccatgagacaaactcaatttcttcgtgatgaaatcaagtttccctcatgatcatcctcgcgccctgacctcggcgccctcctcacttgcgcttgcggatcgccatgcgccgaggcttgagaccgccagccgcggcagcgccggcctcgccgtcgaccacgggctgcatcctggctcgcgccgcgtgcagcttcttgtagctgtcgatcagccgcaggtgccggtcgagcccttccagcttcatgctggtcggcgtcaggccgaagaagcgcacgctgccgtccaccgagcccagcgcggcgtccatccgcgcgtcgccgaacatgcggcggaaattggcctcgtagtcggcgatctccagctcgtcgtcgaggaggacctccagcaccacgttaagcgcctggtagaacaggccgcgctcgacgctgttgtcgttgtactggaggaacgcctccacgccttccttggcgtcttcgaagcgcttcagggcgaggccgatgagcactttcagctcgaggatggtcagttggccccagaccgtgttgtcgtcgaactcgacgccgatcagcgtggtgatgtcggtgtagtcgtccacctcgcagtcttccaggcgctccagcaacgccccgagcgctgcgtcgtcgaggcggtgcaggttgaggatgtcctcgcggaacgccagggccttgttggtgttgtcccagatcaggtcttccaccggatagatttccgagtagcccggcaccaggatccggcaggccgtagcgccgaggtgctcgtacaccgccatgtagacctgcttgcccatggcttcgaggatgccgaacagggtcgcggcttcctcggcgttggcagcctcgccctgccgggtgaagtcccactcgacgaacgggaaatcggccttggcgctgaagaagcgccaggacaccacgccgctggaatcgatgaaatgctcgacgaagttgttcggctcggtcagcgcatggctttcgaaggtcggctggggcaggtcgttcaggccttcgaagctgcgcccctggagcagttcggtcaggctgcgctccagggccacctcgaagctcgggtgggcgccgaaggaagcgaacacgccgccggtgcgcggattcatcagggtcacgcacatcaccgggaattcgccgcccagcgaggcgtccttgaccagtaccgggaagccctgctcttccaggccgcggatcccggcgaggatgcccgggtacttggccagcacctccggcggcacgtccggcagcgccagctcgccttcgaggatttgccgcttgaccgcacgctcgaagatctccgacaggcactgcacctgcgcctcggccagggtattgccggcgctcatgccgttgctgaggtagaggttctcgatcaggttggaggggaaatacaccacctggccgtcggactggcgcacgaagggcaaggcgcagataccgcgctgcacgttgcccgagttggtgtcgtacaggtgcgagccgcgcagctcgccgtcggggtcgtagatcgccaggcaatggccgtcgagcagtcccagcggcagcgcatcgtcgcggccgggcttgaaccagcgttcgtccgggtaatggacgaacgccgcattggcgatctcttctccccagtactggtcgttgtagaagaagttgcagttcagccgctcgatgaattcgcctagcgccgaggccagcgcgctttccttgctcgcgcccttgccgttggtgaagcacatcggcgactgcgcatcgcggatgtgcagcgaccagacgttgggcacgatgttgcgccaggaggcgatctcgatcttcatgccgaggccggcgaggatggccgacaggttggcgatggtctgctccagcggcaggtccttgcccgggatgcgcgtgcagccggcggcatcggtgccgggcatcagcagcgcctgggcgtcggcatcgaggttgtcgacctcctcgatgacgaactcgggcccggtctgcaccaccttcttcaccgtgcagcggtcgatggagcggaggatgccctggcggtccttctccgagatgtcggccggcagttccacctggatcttgaagatctgccggtagcggttctccgggtcgacgatgttgttctgcgacagacgtatgttgtcggtggggatgttgcgcgtctggcagtacagcttgacgaagtaggcggcacacagcgccgacgacgccaggaagtagtcgaacggccccggcgcggagccgtcgcccttgtagcgaatcggctggtcggcgatcaccgtgaaatcatcgaacctggcttccagtcgaaggttatcgagaaaattgacctttacttccacggcgagcaccaagagaaacggaaaccggccattatccgggaactccgggcaaaagtcccagctctccgccgtacgcgtcgctacttgccggcctccccgccgctctccggcacgtagatcatccgtccgtcggccaagcggtaggtcaccccggcgcggctgccctgcccttcgccgatctcgccgctggcctggtagcgcttcagctccttgccgtccttgaccagcatgcgcatgtccgcctcgccgggattctcgaccaccaccaccttgtcctggctgaacgggttgagcgggttctgcacgatgacgatcaggaggatgccgatcaccaccaggaacaggtcgatcaggttgaccatcgagaggatcgggtcgtccgcctcgtcgtgttcgaggaagcgcatcagccggcctcccgcgcacgttcgacggcgcgcagttcctggagcagccagcggcgacgcacggtaaggatgaagaaggtgatgctggcggcgaccagggccaggatcaccgcggaaaacgccaccaccaggttctcgccgatcccctgggcgtcgttgcgggtcagcgccagcagcgccggccccatggggatcatggtcgccaccaggccgagcatcggcgcgctgcgcgaggtgatccgcagccattccaggcgctgcatgatccacagttcgaggtcgtcgctgttgccgccatgcagcgcctgccaggccgccaggcgcgagcggtagcgcccgcgacggcgctgccaggcttccatggcgaagccgccgagggcgacgaaggcgtaggccagcgcggcgaggatcaacagcagcaccggcagcaggaacaggcgggtgagttcgtagaggctggtttccagaccattcatgagcgattttccatcggacgacgattgactacggattgccggacggcgccggcggcgaacagcgcgagcagcacggcggcggccagccggagccacggctgcggctcgccggacggcggcggcgcgacttcttcgaggacgcggccgctgaccgtttcgccggcaccggacgcggccgcgccctctgcctgcgccgcggcctcgccgaaaccgccggccatccgttcgatgaattcacgggtggtcgccgcgccgacctcgccggcgccggcggccgccagttgccgccagcgctcggccagttcgcggcgggtctgctcgctggcgtcccagtagcccttgcggatggcctcggccatgcgcgcgatgatctgcgcctgggcggtcggattgtgcgtttcgaaccactcggcgagacccagctcgcggcggtccatgacgaaggtgtcgtgcaacgcctgccactggtcggcgcggaccatggtgcgatccgccgcctgccagccccacaggttgttggccaggtcgagcatttccaggctgccggcgtagccctcgcgctgcatcgcggcgatccactgcgggctgaggtagcgcccgcgcagctcgctggcgaggaactgcgcggcggccgtggtgcgcggctggcgctggcgcaggtcggcgatgtacagcgccgggctggcgccgtcgaggtggcgtaccgccagcgacaggccgccgaggtactcgaacgggtggtcggtggagagcacgccgttgagcgtcgaggagcgcgagaggatcgccgcctgtacacccttcaactgttcggcgaacaggttgcccccatccagcttcacgccccagtcgcgactgccgtaggcgtactgcaagcgcccgaggaactgctcggcgagcgccgagtcgtcgtcccagcgggtggaatcgagggtcagttgcgttaccccggtgccgtagtcgcccggcgcattgccgaacagccgcaggcgcgacaggcgctgcgccagtggcgcttcgacgccgcgttcgcgcaggcgccgctccagcgcctggctgttgcgcgccagcgggttgcccggctcgtccagcgcggcgaggcgctcgatggcctcggcgagcaggcgcatgaagccgtcgaactggtcgcggtagacactggtcacctgtagcaccacgtccacccgtggacgccccagttccgccgccggcacgatgtccagcgccagcaggcggccaccggcgtcccagcgcgggcgcaggccgagggcgtgcagcgcctggctttcgacgatgcccaggtggcgcatggtttccgacgaccagaggctgaaggcgagcttttccggcgccctgccctggtgctcggcgcggtagctttccagcagttggccgaaggcctcggcgccggcttcgtaggcggcgcgggtcggtaccttgtcggcctcgaaggcgaacaggttgcgcccgctgggtacctgtggattgcggatcggatcgccgcccggcccgggcgcgacgaagcgcccggcgaggccggcgagcagcgcctccagttcgccggtgtcggcgagctggcggtccagttcgcgggcgcgcagcaactgctcgcgcaggcgcggatcggccaccttggcgatctcgccgccgtcgcgcaggtagcgttgcagcgtgcggtaggcacgaccttcccgcagcgccctgaaatcggcggcgaacagttcgtcggggtcgagaccgagcgcgcggtagtagggctcgccgagctgctgcatgacggtgcccaggcgcagctccggcgaggcggcgacaccgaaggtgtgcagccccagcggcatcgccgagccggccagtcggtgcaggtggtcgtggagcacgccgaggaacgccgggaaatcctcgcgcatcgctgcctcgctccagtccaggtcgtcgttcatgtgcgccgcccgcaccgccgcgcggatctgctcggcgctgcgttcgcgcaccgcgccctcgtccagttgctggtattcgtggatcaactggtgcaggtcgcgcagttcgtcgtacagcccggccggggcgaacgacggcgtctggtggctgacggtgaccgcgcgcccgcgccggcgcgcctggatcgcctcgccaacgttgtcctggatgtacgggtagaacaccggcaggtcgccgagcgtccgcagcgggtagtcgcccaccgccagcccgcggtccttgccgggtagccattcctgggtgccatgggtgccgaaatggatcagcgcgtcggcgccgaaaccctcgcggacgaactggtagaccgccaggtagagatggtccggcggcaccgcgctgtcgtggtaggcctcgcccggacggccggcacgcggcggctgcggcaacagcagcagattacccaggcgcgccgccgggaacacgaagcgtcgctggccgtcgatatcgcgcaaggcccaatgtcgacgggggtcgccccagcgcgcgcgcatctcctcgcgcagatccgccggcagcgcctcgaaccagtgcaggtaggcgtccagcggcaggctcgcggcgaggccgtcgcgatacagcgcgtccagggtctgcggccggtagtagccgccgagcaggcgctgggcggtatcgatcagcgcgctttcgtcgctcgtcgcaacccggtagccggccgcccgcagcgcttcgccgagactggccaggctggccggtacattgagatgcgaggcggcgacgttcttctcgccctccgggtggttccagaacatcagcgccaggtgcttgtccgccgccggcaggcgacgcaggcgcagcagccggtcgagcttgtccagcagggcctcggcctgcccggccatcagcttcggctcgccgttctccagggcgctgatcaccagcggatcgctcattccccaggtttccggcatgccgaggaaggccgccgcggtacgcggcgccaccccgctggcggcggccagccagtcggcctcgttgccgtcgcggtagccgagggtctgcaataccggcacgtccagcgcgaggaactcggcacggcgcgccgggccgttctgcaggtgctgcaggttgaccagcgcctggacatcggcgccagcgaaggacttcctcaacgcctccggatcgctgtcgtcgaaccacaccgccagcggcgcctggccgtgccgctcgctacgccgcaacagttcgtcgatggcgccggtctgggcgtcggcgatggcgccgcgcgggatcaggaaggcgatgcgcggggcatcgctggcccagcgcgaggcgccccaggccaggtagtcggcgaggccggcgaacggcgccggtgcgtcgggatgatagaagccggcctgcgccaggggctgcggcgccggcaacgcgtcgacgggcaggccggcatgccagcgtcggaccgcctcgaacagccggcgcaggttggcttcgccgccgttcgcgtagtagccgaccaggcgcccgcccagcgccgccggcaggttgccgaagcccggaggaccgccgccgacgcggatccagggttgcgtcccgccttgcaagcgctcgcccagcgcctcctcgacctgggcgcgatcggtcggccgcggcgtgtcgaggatcagcaggttgccgccgtccagccactcgccgggcggcgcctcgccgatgccgaggcgcaggccgcgcaactcgacaccggcctcgcgcgcccaaccggctaggcgctggtgcttgcccgggaggacgaaatcgctgctgagcagacgcacctgggccgactccgcccaggcacagagactggccagcagcgcgccgcagaagagtagcgaacggcgcatcagaagctcgccaccaggccgagatggaaggtccgcccaggttcggcgtaggtgaagtgcgtgtcgtcgtcggccaggcgctggtcgccgaggttctcgatgccgccgcgcagcgtcaggttctcgttgagtttctggctcagctccaggtgccacaggctgtaggccggcagggcatagccgacgttgctgctgtaggccacctggctgccgacgtattcggtgcgcaactgggcgctgaagcgggcattggggctccagcgcaattggctgttggcgaggtgccgggagcggtcgccgaggcgctggccggcggtgcggttgcgcgcgtcgaggtaggtgtagttgagctcccagcgcaggtccgccggcaggtccacgccgccgcccagctcgaggccgcggatccgtgccctgtcgacgttctcgtagttgcgtatctcgccgccgcgcaccccgcagcgcgctacgcagacggtctggatcaggtcgcggacatcgttctcgaacaccgtgcccttcagcgaccagccatcgccctggtagtcggcgcccagttcgtaggacgtattggtctccggcttcaggtcgggattgccgtagatggtgaagcgcccgccgccaccgaccgccgcatactccggcgatagctgcttcaggctcggcgccttgtagccgcggccgacgccggcgcgcagggtcagcgcatcggaaaggtggtgcagcaggtacaggcgcggactgctttcccagccgaacgcctcgtgcttgtcgaagcggctgccgagggtcagcgaccagtccgggccgaaggcgatctcgtcctgcaggaacagcgccttgtgtcgcgcgctggcgtcgccggcggtattcaccgagcgatcctccagttcttccttgcgccattcgccgccgagggtgaagagatgtcgctcgaaggccggcacgctgaggtggccgtcgaccacgctgtcggtaaggcgctgcgggttgctcggcggttgtccgtcggaacgcgcgttgtgccgctccaggcggttgcggtaggtgcgcagctggctgctgccccagtcccactggccattgtgggcgagcgaccagcgctcgcgttcgatcacgtcgcgcgactcgtagtagcgcgagcgcgaccctccggtctcgctgttgcgccagcgtcgttcgcgcccgcgctggtggccgaggtcgatgcgctgggcgtcgtccggggtccagctgaggttcagcccaccgctgtcggcgttgccgccttccagctcggagagtcggcgctcatcggcgtccggggtttcctgctggcggcggctctcgccgttcagggcgaggcccagcttgccgggcaccagcggcccggcgagataggcgccgagctggtggctctgcccgccgaggccgtcctcgcgcacgccgccatcgagcagaccgctacccgtccaggtatcggtggcgcgccgggtgatcacgttcaccaccccgccgagggcttccgaaccgtagagcgaggacatcggtccgcgtaccacctcgatacgctcgatgctctccaccggcacccagccgaggtcgaagtcggaatgggcgatggccccggacgaggtggagatccgctggccgtccaccagcaccagggtgtgctcgctggacatgccgcgaacgctgatgccccgccgggacatgccgacgccgttgaactgcaggctttccgaaccgcgcagggcttcctgcaggtcgcgcaccgggcgccgccgcaggccctcggcggcgatcagcgaaacgctggccggggcgtcgcgcagcttgcgctcggtagtggtggcgctgaccacggtcggctccaggtcgaccggcgcggccagcgccaggcagggaagcaggtagaggaacggcacggcgcgggccagccgcagcggaggaagacggtgcggggaggaatggggggtcatggtcggcaggtatgaattatgaatatttataagttataacataacatttcttcgaatgaagaatgcccgccgtttcttcttcatcgaggcgagggaacgtctcgctcgccgtatccctcgaagcacaggaccccactctcaaccgggcatgccccccaggaggaaagatgaccgcaaccgagcagatcatggcgctcctcgaacgctgggaccgccagcaggagggctacatccgccagcgcgaggagcgctacgaggcgatgttccagttgctcgaagacctcttcggccgcgacgggcgcttcaccgccatcgacgccgcctgcggcccgggctccctcggccggcgcctgctcgaacgcttcccggcggcgcgggtggtggcgctggacgccgacgtcatgctgctggagatcgcgcgtacggcgctggccggtttcgccgaacgggtccgcgtggtggagtgcgacctcaccgatccaggctggaccgaacgggtcgccgaagcgcgcgagtccctcgccggcgaacggcccgcggcgctgctctcttccaccgcgttgcactggctgtcgcccgccgaactcgccgggttctacgcccaggccggcgagctgctcgcccccggcggcgtgctgctgaacgccgaccacatgcgctacgaccgacgctggccgggactcgcggaattgtcccggaagcaccgcgagcgggtcctccaggcgtccgtggccagcggcgcggacagttgggaagactggtggcaacgcgccgcgcagatcccccggctggccccgctgaaggcgcagcgcgacgcccatttcgcgcggcgcccgctcaggcgcgccagcgaagacgaagactgctcgctcgatttccatctcgccgccctgcgccaggcgggtttcgccgaggccgccacggtctggcagcagttggacaactacgtcgtcttcgcccgcctcgcccaggcctgatacgccgtcacccgagcacggggaatacctccaatggaacccggccaatccgccggacgttgacgcagatcaacgccggctcggcatcgctcgccagaatccacaacatattgttgttttgcaaaatcaaaacacatcatgttgtggagaagttgaaatgacccagccccggaaggctacctggccggccaccctgctcaagcgcaacggacgtgaagtccctttcgatcccggcaagatcgaacgcgccatcgccgccgccggccaagccaccggcgagttcgacccgcagcaggcgcaggcgctcgccgaacgcgtggtggaacgcctgccggaacgcgcctgcctggatatcgaacgggtccaggacctggtcgaacgggtgctgatggaggccggccactaccctacggcgcgcgcctacgtggtctaccgcgaacgccacggccggctgcgccgcgagcgcaagaccctggtggacgtcgccgcgtcgatgaacgaatacctgtcccgcgaggattggcgggtgcgcgccaacgccaaccagggctattccctcggcgggctgatcctcaacgtatccggcaaggtcaccgcgaactactggctggatgaggtctacgatgccgacatcgccgccgcccaccgcgacgccgacctgcatatccacgacctcgacatgctcgccggctattgcgccggctggtcgctgcgcaccttgctgaacgaaggcctgaacggcgtgccggggcgggtcgaggccggtccgccgaagcacctgggcagcgccctggggcagatggtcaacttcctcggcaccctgcagaacgagtgggccggggcccaggccttcagctccttcgatacctacctggcgccctacgtgcgcaaggaccgcctcgactacgccagcgtgcgccaggccctccaggagttcatctacaacctcaacgtgccgtcgcgctggggcacccagacgcccttcaccaacctgaccttcgactgggtctgcccggacgacctgcgcgaccaggtgccgcgcatcggcggcgaggagatgcccttcgcctacggcgagctgcaggccgagatggacctgatcaaccgcgcctacatcgaggtgatgcaggccggcgatgcccacggccgggtattcaccttcccgatcccgacctacaacatcacccacgacttcccctgggacagcgacaacgccacgcgcctgttcgagatgaccgcgcgctacggcctgccctacttccagaacttcctcaactcggacatgcagcccaaccaggtgcgctcgatgtgctgccgcctgcaactggacgtgcgcgaactgctcaagcgtggcaacggcctgttcggctcggcggagcagaccggctcgctgggcgtggtgacgatcaactgcgcgcgcctgggctatcgccaccgtggcgacgccgccggcctctaccgccagctcgaccacctgctcgaactcgccttcgccagcctggagctgaagcgcaaggtgatccagcagcacatggatgccggcctctatccctacacccgacgctacctgggcaccctgcgcaaccatttctccaccatcggcgtgaacggcctgcacgagatggtgcgcaacttcagcgacgaccgcgagggactgcacagcgaagccgggcgcgagatggccctggccctgctcgatcacgtgcgcgcgcggctggtgggtttccaggaggacagcgggcacctctacaacctggaagccacgcccgccgagggcaccacctatcgcttcgcccgcgaggaccgcaagcgctatccgcgcatcctccaggccggcacgccggaggcgccctactacaccaactcctcgcaactgccggtgggcttcaccgacgacccgttcgaggcgctggagctgcaggacgccctgcaatgcaagtacaccggcggcaccgtgctgcatctctacatggccgagcggatttcctccgccgaagcctgcaagaccctggtgcgcaccgccctcggtcgcttccgcctgccgtacctgaccgtcacccccaccttctcgatctgcccgcggcacggctacctggccggcgagcacgagttctgcccgaagtgcgacgaggagctgctgcaacgctccacgcccaagagctgttgcggcggctgcggcggttgagtcgcctgtcgttcctttcatccaccagcaaggagtaccaccgatgaaccccaaccagttgcccgaaggccagcgccagcgctgcgaagtctggacccgcgtgatgggctaccaccgtcccgtggcagcgttcaatgccggcaagcagtccgagcatcgcgaacgccgccatttccgcgagacgcgatgagcgccacgctcagggtcgggggcctggtgcccctgaccaccctcgactaccccggcctgctcgcctgcgtgctgttctgccagggctgcgcctggcgctgccgctactgccacaacccggaactgatcgcgccgcgcggcgcggaggaaatcccctggtcacgcctgctcgacttcctccgccgacgccagggcctgttgcaggcggtggtcttcagcggcggcgaggcgaccctgcaggcggccctcggcgacgccatgcgcacggtccgcgaactgggcttccgcgtcggcctgcacagcgccggcatcaacccccgcgccttcgcccgggtgctggcgcagagcgactgggtgggcttcgacgtcaaggcgccggccgaggacgtcgccgccattaccggcgtggacggcagcggcgcggccaactggcgcagcctggaatgcctgctggacagcggcgtagcctacgaatgccggaccacggtgcactggggcttgttcgatagcgaacgcctctggcgcctggcgacgcgcctgcgcgggatgggggtggagcgcttcgccgtacaactggcgcgcccggcccgccagctcgatccgcagcttctcgcgaagcccgcgccgcagggcgctgcgcagctatggcgagaactggaagagctgtttcccgccttcgaactgcgcgacgcctgagcctccggttcagcggcgccgctcgggcctgccagctcgctcggacagggcgggcagtcccgaccaggcctgcccttcacaagactcatacgatcgtacgagagcaccttctcgattcctagttgcgtccaattgtcgcggacggcgccgctcgccacccttgctccagattcagcgaccccggacccgcgccatgaaactcacgctcacccctcccctgacccccagccactggatgcgctcgaccgacctggccgacgccgccagcgcccccctcgtcggcacccactcggcggacgtggcgatagtcggcggcggtttcgtcgggctctggaccgccatcaccctcaagcaactggagccggacgcacgggtcctgctgctggagcaggacgtctgcggcggcggcgcttccggcaggaacggtggtttcgtgatgtcctggtggccgaagatcggcaccttgctgggcttctgcagcgaggcgcaggcgcgcttccttggcgaaagcgcggagcgggcgatccaggaactcggggagttctgcgcgcggcatgacatcgatgcgcacttccagcagaagggctggctgtggaccgccaccacggcgcaccacctcgacgcctggaacgataccctcgccgcctgcgaacggctcggcgtcagtcccttcgaacgcctcgacgccagcgaagtggcacgccggaccggttcgccggtgcatctcgccggggtcttcgagcgcagcaatgccaccgtgcaaccagccttgctggtgcaaggcatgcgccgcgtggcgctggccctcggcgtggaaatccacgagcgctgtggcgtcagccagatcgttcccggccagccggcacagctgctgagcgccggggcccgggtccaggccaaggcggtggttctcgcgaccaacgcctggtcggccgccctgcccaggctctccaggctgatcgtgccggtgaacagttccatcgcggttaccgaggcgataccgcaacggctggagcgaatcggctggaccggcggggaagccatcaccgactcccaactgatggtggactactaccgcaccacccgcgacgggcgcatcgccttcggcaagggcaccggcgccatcagctacggctcgcgcatcggccgggtattcgacgtcgaccgggagagcctggccctgaccgaggccgacttccgccgcacctatccctcgctaggcgacatcccgctggtcgacggctggtccggccccatcgaccgcacctacgacagcctgccggtcttcggccgcctgcacgagaacatccactacggcatcggctggagcggcaacggcgtgggaccgagccgcctgggcgggcggatcctcgccagccttgccctcggccgcgacgacccgtggagccgttgtccgctggtagaacgccgctgccggagcttcccccccgagccgctgcgctacctgggcggctccctggtgcgcaacgccgtcctgcgcaaggaacgcgcggaactcgccggtaccgcgccctcggccaccgaccgctttctcgcgcgcttcgcccctgccggccttgaagacaaatcctgaggagcccatggcatgaacccttcgctcatccgtctcgacgacgaaagtcttttcacctcgcccacgcccgtcggccagcccctgggcgaaccggtagccctgacccgtaccgcggcccaccgcccgctcgccgacggcaacggcgtgaccggcatctgggaatgcaccccggggcgcttccgccgacaggtcgagcaggccgagtacagctacatcgtcagcggtgaaggtcgcttcaccccggacgagggccaggccgtggagtttcgcgccggcgacgcactctatttcgccgctgccacccagggcacctgggacatccgccaaaccgtgcgcaagacctacctgatcttcgactgaccccgaagaaccgaactccaccgccctgacagaggaaacaagaaatgggtatgcgagaagcgaacgacaacgcatcgggcctcaaggcccatcccctgggctcgctcgagacgatcgcgatcatcatcggcaccaacatcggcgccggcgtgctgagcatggcctacgccgcccgcaaggtcggctacgtgccgttgctggtatgcctggccctgacctgcctcttctgcatcgtcaccatgctctacgtgaccgaagcctgcctgagaacccgcggcaacaaccagctcagcggcctctcccggcgttacctgggcccgctcggcggctggctgatcttcatcgcggtggcggccaacagctacggggccctggtcgcctacatgaccggcagcggcaacatcatgctcgagttcttcggccagtacggcctcacgcgcgaggtcggcagcctgatcttcttcgtcccctcggcgctggtgctctacctgggcctgaaggcgctcggcgtgggcgagaagctgatcagcgccggcatggtggccatcgtctgcatcctcatcggcgctaccctgatgcacgacgacgcccgtctcgcccacctttggcagagccagtggcaatacgtggttccagtgttcaacctggcggtcttcgtgttcggcgcgcagttcctggttccggagctggtgcgcggcaacctggcaacccccgggcgcgtgccgcgcctgatcgtggtcggcatgctgctgaccttcctgctggtggcggccattcctgcctcggtcatcgccctggtcggccccgacaacctcagcgaggtggcgaccttgagctggggacgctccctcggccaatgggcctactacgtggcgaacaccttcgccttgctggcgatgctgacctcctactggggactcggcgggtgcctgttcaccaatatcttcgaccacttccgcctgggcagcgaaaccaaccggcgcaaacgcctggcggtgctcgccgcggtctcggtcccgccgttcctgctggcctatgcggggctcggcggcttcgtgaacgcgctgtacttcgccggtaccttcggcggcgtactgatgggcatcatccccatcctcctgctcaacgcggcgcggcgccacggcgaccaactgccggcattcagctgcggctggtatgcccatccgctgatacaggggctgatcgtcctggtgttcgcctccagcggggtctacgcgatcgcctcggcactggggatgctgcccgccagttggtgacagggcgcgctgcctgcgcccggggcgattacactgaaggcccatgcctggagtttcctggacatgccgcagagcatccgccacctgatcgccctccccgaactccgttcgcgcctgctgagcggagccggcggcctcgaccgcccggttcgctgggcgcatgtctgcgaactcgacgaccccaccgaatggctcggcgagggtgacctgctgatgaccaccgggctgggcataccgagcgacgccgagcggcaacggcgttacgtccgaagactggccgaggccggcctggcaggcatgatgatcggcgagaacatggaagccccgagcgacctcgatgccctacgcgagacggccgaggccctgggcttcccgttgattctcacccactacggcgtccctttcgccgccgtgacccgggccatcgtcgatgcgggacagaaagacgaatacgagcgccgcaacgccctggcccggatatacgaaagcgcccggttgagcatgcagggactgggcctgccggcgctgctgcaacgcctcggcaaggacgtgcgaagcagcctctacctcatcgttcccgacaccctggcggcctggcagccaggcctgccagggctgcccgcggagttggccgacgcgctgcgcaaccgccgtcgcgagcaggcggagccgcagccaatggtccttcgccatccgctcgcggaaggcgaagcgctcagcatcggcattccttccgaccggaactgcctgctgatagccctgggcgagcggctgccggactacagtctcctgcaccacctgacggcagtgctcggcatagagatcgaacggctgcgcgtcgaaagcgaacgccacctgcgcctgggttcggaattgctcgacgacctgctgcaacgacggctataccgggaacaagccgaggagcggctggaggaactgctgcccgggctcgatctcgacgatgcagtcgtttccgtggcaagttccgaggggctcgcgaccgaccctatcggtcttttccggggccacgactcacgcctgctggttcgcgcgcaaggccaggaaatcattctgctgcaccaggccggcctcgcctcgacactgcaggaagccctggacagctcgctgggcgtgagcgccccgctccgtcgtgccgaacgttgcgccgaggccttgcgcgaagcgcgtctggccctggcccacagccattcccggcgaccgttgtgtcgctacgcggaactggacgacgaggcgccctggctacccagaagcctcgccgaggccgagcgggcgttccgtctggtcctcggcgccctccacgactatgacgcggccaatggctccgcactgctacacacgctgcaggtctttctcgaggaaaacaggtcctggttgaacgccgcgcagcggctacacatacacaagcagagcctggtctaccggatacgccgcatcgaggaaatcagcggtcgctcgctggacagcaccgccgatgtggcgaccctctggttcgccttgcaggcaacccggctgtcgccggaagcgaggggcaggacggcgaagggcagcctcctggagcagtccgcgcaccatggcggcgacatggactgacggcggagcccgatacctggcgcttgcagggcgacgccgccgccaacaggcgcggccaggaacggttgcctggcagcggcgtggcctgtggatgccggaccacggtgcatcgcagcgagcgccgttgcgaatgcattaatcccccttgctagctagccaccccgccgctggagcggcgcggcccgcgcttctaggctcgaacggtaagacggaagcccatcggcgcggcgcaaaggaggcctgcgatgcgtaacggaatcgacgctgtatccgccccgctacccaccctgttcgtatctcctctggcggtcttcaccgcctccctcgagcgacttcccccacgcgctcggcaggcccccgccgcccagcgcccgccggggtcgcccggcattcccggcagcgcccggttgcagactggcgccaccacgtcccgctgacgtcccaacgccgacggccatgccgtcgcaagcgcttcatcccccgcgatccgcccgtcgcgctcgtccccatcgggaccaaccgggccgcccccggcccgctccttcgaacctgcgtggagtccatcccatgaacggaagcagatccacctttctctaccttctcgccgccgccggcctggcgctgacacccgcggcccaggccgaccggggcaacgacgtggtcgcccggctcaaccagttgtacaacgacacccgccaggattgcggcggaccgtcgaagccggcattcctctgttccggcgtactgttccgcgccacctggccttcgaccgactacatgttctacagcatcagtccgaagagccagaaaagcggcggcgtctccgcctcctacctgcgcaaggacgccaagtaccgcaagctcgcctatggcctgaagagtggcttcatcttcgacaccatcttcggtaatccgaaggaccaccaggactatgcggtgctctgttccttccccatcgacgccgccaccgacgaccgcgcccagcagggttgcaccgattcgcggcgcacgccgaacagcgtcgagaagtcctgccaggacatcaacgtcagcaccgccgagcagtgggcggcgaactaccggcagaaccgcggcgaccattcgcggcagtgctccttcgacgtccgcgacgagcgcaataccgccgccggcccggccttctaccagagcatccgggcgatggcgcagatcgccgacgaatccttcaccacccagaacgaactgcgcctggccaagtgggaggaaaacccgccgaagtcgccgtcgatcctcgccgcgttctacaccgaggacgccggcctggagggcgctcggctcaaccagatccagtggtatcagtcggtccaggcattcctcccgatcatcaacatgcgactgccgcagacccgccagcaggacgcgcagttcgcctacgacgggcgtaagcaggcgatctacccgaccagcgagaagaatgcctgcgagcgctatgtggaaagcgccacctgggtggagcgcgacgatccgggcttcaggaagaagatcatgaccctggaagtggtaccgaccgattgcgggcgcaagatccaggacaaccagaccaacaatttcttcaacgagctggtggtcgaccactacctggacagcgaatggaaggacaacccggacaaccgcgacagcaatatcggcagcatgcgccgacaactggtctgccacttcaacgtcgcccgcaacaagcccgagtggaacctggaaccctcgcggccgtacacctccaacgaggactccatcgccaagggctgcaataacacctgaggccgctccgcgggggcgctaaggcgtcccctgcgaacagcgatatggccttttgatatcacacgctctaccatgccgtctttccaagccgccagggaacgaacgcatggctttcgatgccgcccgctatgtccaccgctactacgccagcctggcgcccgccccgggcaacgaatacccgcgcctgagggcctgggagtacctctgggagtatgtctgggaccccagtcgcagctgggacgacctgaccgcccccgaacagctcgacaccaccgccctgcacctgggtttctacctggccaactggggcatgttccgtggctcctcgggactgctgcagaacagcaacctggacctgatgaaagcgctggcccggcagctcttcagcggtgccggaccggaactcttcgagctgtccctggtggatttcgccggcaacggcgcgcgcctggcgcacaaccgcaagctgctggaaacggtactcgggtcgatggacgccctcagcagccgggtgagctggaccgacaccctgaagagcaagatcctgctcggcgtctggggcgagtttcccgccctcgaccgccactacgtggccgcctgtcgcgcgctgtatccacgccggggcctgacgagcgtcaacggcgggaccctcaccgcgctgcaccgcctgatcggcgaagaaaggctgtcgttcccgcgcctggagaccgcccgcaaggggctcctctaccccaccgggcgcctggccgacatggctttcttccagtacggcctggaaaacgcctgaggcgctgcgccgccgatccgggggacttgtaggcatgccctcgctgtaagtagtatgagactcattctcaattacaacagcgatcccctccatgccgccggccgacgcctccctgcacgacgctgtgagccatctctaccaggaccaccatggctggctgcaaggctggttgcggcgacgcctgggctgcgcggaaaacgccgccgacctggcccaggacacgttcgcccgcctgctcgcctcgcgccgggtactggatgcgcgcgaaccgcgcgcctacctgaccaccgtcgccaaggggctgatgatcaactggttccagcgccagtcgctggagcgcgcctacctcgatgccctggccaacctcccggaagacctcgcgccgccgccggaacagcggttgatggtgctggaaaccctgcatgaagtagacgccctgctcggcagcctgccggacagggtccgccaggcgtttctcctggcgcagatcgaaggcctgaagtacgaagccatcgccgagcgcctgggcgtgtccctgggttcggtcaagcgctacatgcagcaggccttccgccagtgcctggagctgatggaatgaacgccgcggacgaaggccggattccctcgccgatcctcgacgaggccgccgagtggctggtgcgcctgcaggacagcggctgcaccgacgacacgcgccaggcctgcgcccagtggcggcagcgcagcccgcagcacgcccatgcctgggagcgcgccgagcgcctgctgcaatgcctcggccgactgccgccggcgctggccctgccgaccctcggccgcgagcgcgggctggaccggcggcgcgcgatcaagcacctcgccctggtcctcggcggcgcctcgctggggctcgccacctggcaggccgaaccgttgcgcgactggctggccgaccagcgcaccggcgtcggcgaacagcgccgcctgaccctgcccgacggcagcctgctgaccctgaacaccgacagcgccgtggacctggctttcgacgccagccagcggctggtacgcctgctgcgcggcgagatcttcgtcgatagccgccccgacccgcgtccgttccgcgtcgccaccgccgaagcgcggctgcatgccggtgccgcccgcttcaacgtacgccaggagatggccgcgacccgggtcgcggtactcgccgggcgggtcgaactgagcccgctccacggacgcgggcgctggctggaaagcggcgagtcggtgcgcctgggcgccgacggcgaagcgcgccggctggccttcgacggcctgccggacgcctggacccgcggcatgctgatggccgaccggatgccgctggccgaggtgctcgccgaactcgcccgctaccgtcgcggcgtactgcgctgcgacccgcaactggccaggctggcggtgtcgggcgcctatccgctgctggacctgcggcgcacgctgggcatgctgcaggccacctatccgctgaaggtgcgcggggtgaccgactactggatcagcctggtgccggcgtgacggcgcggccgccatccccgtggcaaccgccccctcgcgtccaccccggcaggccgtccgccgttgcgccggaacaggcgttgccatcgacatcccgtgctccgcagaaaaataaccgcctcgacctgagacctttttccttctcggctggcaagtagaggaatccgccccgacccaaggtccgcagagaccacgaggaaccctgtacatgcccgtacgcacgcttcgcccccgttcgctgtccctggccatccacgccgccgccatgaccctcgccctcgccggcgcggcccccgccctgcttgccgccgaggcgcccgccgccagctcggcgcgcagctatgacatcgcccccggcccgctcggtcgcaccctgtcggccttcgccagcgacaacggggtgtccctggcgttcgacccggcgctcaccgagggtcgccgcagcgccgccctgcgcggccgctacgcgccggtcgaggcgctgcaccgcctgctgctgggcagcggcctggagttgcagcagcgcagcgacggcagctacaccctggtgccggcaaccaccgatggcgcgctggaactgcaatcctcgctgatcaccgcccaggccgccggtgccgagaccctgcccgccgagtacgccggcggccaggtagcccgtggcgcgcgcctgggcatgctgggcaacgccgacgtgatggacgcgccattcagcatcaccagctacaccgccaggaccatcgagcagcagcaggcgcgcagcgtcgccgacctgctacaggccaacgatccgtcggtgcgggtggtcggcgggcgcggcgacctggtggacagctacacgattcgcggcttcagcgtgcagaacgccgacgtcgccttcaacggtctctatggcctgctgccgttctggcgggtaccgatcgaattcgccgagcgcgtggaagtgctcaagggaccaaacgccctgctcggcgggatttcccccggcggcagcgtcggcggcaccatcaacctggtgcccaagcgcgccgacgaccagccgctgacccgcgtcagcgtcgattggacccagcgcagccagctcggcactcacctcgacatcggccggcgcttcggcgagaacaacgccttcggcgtgcgcttcaacggcgtctaccgcaacggcgataccgccgtcgaccatcagagccgcgagtttcccatgctctccctgggcctggacttccgtggcgagcgcctgcgcctgtccagcgacctgctgtaccagaaggaaagcctggaaggcgtggtgcgcccgctgctgaccggcccgggaaccacccacatcccccatgccccggactcgaagacacgcttcggcctgcgcgattcctacctggaccaggaggattactccatggtcaaccgcggcgagtacgacctcgccgacaacctgacggcgttcgccagcatcggcggccgccagagcaactacgaaaccatcgccgccaacagcatcctcgtcggcaaccagggcgatatcgtcaacagcctggcacgccagcgcggcgaccgccgcacctattccgccgaggtcggcctgcgcggcaacttcgacaccggcccgctccgccacgactggacgctcagcgccaaccgcctgcacgaacggctgggcatggtctatgccttcaccgggatgcagccgggcaacctctaccagacctcgccgcatacgccgctgccggacttctccagcctcgacgggagcattccgaagaccaatgaaaccgacctcggcggcgtggcgctggccgacaggctgtcgttcctcgaggatcgcgtgcaggtcaccctgggcgtgcgccgccagcagatcgagtcgcgcaactacgaccagaccagcggcgcgcgcaccagccacgacaagcggcacgtgtggacgccgatggccagcgtgctggtcaagccgctgcaggacctgtcgctgtacgccaactacatccagggcctcagccagggcgaggcggcgccgatgaccgcggccaacgccggccaggtgctggcgccatacaaggccgagcagtacgagatcggcgccaagtacgacctgggcggcttcaccaccaccctggcgctgttcgagatcaggaaaccgaacgcctataccgacgccagcaacgtcttccgcgccgacggcgagcaacgcaaccgcggcgtggagctgagcctctatggcgaaccgctggacggcgtgcgggtgatggccggcgccacctacatcaagcccgagcagaacaagaccggcgaccctgccagcgaaggcaaggacgcgcccggcgtggcccgccgccaggccaacctgggggtcagctgggacaccccattcgtcgacggactgaccctcgacagccgctggatctacaccggctcggcctatgtggacagcgccaacgccctcgccgtgccgcactggaaccgcgtcgacctcggcgccgcctacgccttccaggtcgccggcaagccgctggtggcgcgcgccaacctggagaacgcgctgggcaaggactactggaccgcagccaacggctacctgtcgatcagctcgccgcgcaccctttccctttccctcacggcggacttctgagtccgccccaccataaccagaaaccgccgatgaccagcctatgaccgcgaaaaccctgcgcacctggtacctggtgcacaaatggaccagcctgatctccacgatcttcctgctgatgctctgcctcaccgggttgccgctgatcttccacgaggagatcgagcactacttcgagccgcatccgcagctcgagccgctcaccgccgagtcgccgcgcatcgactacgacgacgtgatcgcccgcgccctggccgcccggccgggcgaagtggtgcgcttcctggtattcgaaaaggacgacccgctgggcctggtgatcagcgcgccgagcctggtaccgccgccggagaacggccacatgcagccgttcgacgcgcgcaccggggaattcttcgacgcgctgccgccgccgggcggcttcatgtacctgatgctgaagctgcacaccgacctgttcctcggcctgcccggctacctgttcctcggcctgatgggcctgctgctggtggcctcgctggtgtccggggtggtggtatacacgccgttcatgcgcaagctggacttcgccacggtacgcgccgaacgcagccgtcgcctgaagtggctggacctgcacaacctgctgggcatcgtcaccctgtcctgggtactggtggtcggcgtgaccggggtgatcaacaccctggccctgccgatcctgatgctctggcaaggcgggcagttggcggaaatgaccgcgccctacaaggacgcgccgccgctacagcgcctcggctcgctcgacgcggccctggccacggcacgccgtgcggcgccggacatggaggtcagcttcgtcggcttccccggcacccagttcagcagccagcatcactatgcggtgttcatgcgcggcaacacaccgctcaccgagcgcctgctgaagccggcactgatcgacgcgcagagcggcgaactcaccgacatgcgcgagatgccgctgtacgtgaagacgctcctgctgtcgcagccgctgcacttcggcgactacggcggcatgccgctgaagatcgtctgggcgctgctcgacctcgtcagcatcgtcatcctcgccagcggtctctacctctggctcggccgacgcaagacgccattggagaagcgcctggcggaactgccggacggcagcctggcgacggagggcaaggcatgaggcgcggtctctggatgatcttccgctggcccctgctactggccctgctcggcctcttcgggctgctctcggcgctgctcggcgacggcctctacgacctgctctcctggctcgccctgggcactccgctggtgctggtcggctgggtctggctgcgcctgccgcgaacccgaaggaatctctgagatgaccaccccgccgccctccaccaacaccctggacctgcgtccgctgatgttcgagaccttcgtctgcaccctggcggtgatgtccttcgtcgccctggtcggcccgctcgcccgcaagctcggcctggcgccctggcaggccggcgccgcggtgaccgtcggcggcatcgcctggatgctcgcggcgcggccctggggcatcgccagcgaccggcatgggcgacggcggatactgctcggcgggctggccggcttcgccctctcctacgcctcgctctgcctgttcatcgtgctcgccttgcactggacgttgccgaccctgctcgccttcgccggtatcgttctcctgcgcggcctcgccggcggtttctacgccgcggtgccagcctgcacggcggcactggtggccgatcacgtcgaggcgcaacgacgcgccgcggcgctggccggactcggcgcggccagcgcgataggcatggtgatcgggccggggctggccggactgctggcgactcacgggctggtcctgccgttgctggtcaccggcgcgctgcccctggtcgccctgctggcgctctggcgctggctgccgcgcgaggagcgtcgccagccgaaccgcggcgccgccctggcgatcggcgaccgccgcctgcggcggccgctggcggtgggcttcgtggcgatgttcagcgtcaccgtggcgcagatcaccgtgggcttcttcgccctcgaccggctgcgcctggattccgccgacgccgcgcgggtggccggcatcgccctgaccgcagtgggcgtcgcgctgatcctggcccagctcctggtgcgccgcctggactggccaccgccgcgactgatccgggtcggcgggctggtcgccgccatcggtttcgccgccgtgtgcttcgccgactcgccgccgctgctctggctggccttcttcgtcgccgcggcgggcatgggttgggtgttcccggcagtctcggcgctcaacgccaatgccgtgcgcgccgaggaacagggtgccgccgccggcaccctggtggccgtacatggcttcggcctgatcagcgggccgctgctcggcacgctgctccaccaattggacagccgcgccccctacgcgctggtcggtctgctgctggcgctggcggcgttctggccgagccaaccgacgcgccccgtggaaacgaggagcgaagcaccatgaccgctgtcgacctgctgctggtcgcgaccctgctggcggccctgctcgcctggtggatacccgccctgcccggccgccgtggcctgctggcgctcgcctcgacgctggcgctcggcgccggcctgtacgctgtatgggacgaccgctggcaagccggcgtcggcgccttcgccggtttctccctgctgctcggcgcctgcctgcgccggaagcccgtgcgcggcctgccgttccggaccggttcgctgtacggcctgctggtgctgctggcaatcgccgcgctgtacctgttcccggtcgcgccgctgccggcgccgagcggcccctatgcggtcggcgtgcgcgatttcgaactggacgaccccagccgacccggcctgctcggcgccccggccggacaaccgcggcgcctgctggtacgcgcctggtacccggcacgcccgatcgccggcgccgcgccgcgtcactatttcgacccaggcgaggcacgcagcaccgcgcggggcttcggtgaaatactcggctttccgccgttgctcgcctacctcaagcacctgcgcaccaattcctatccggacgccccactgcgcgacgactccgctcgcctgccggtggtgttctacagccacggctacagcgccttcgccggtggcaactggaccctgatggaagagctggccagccacggctacgcggtctacgccatccagcacagcggcgacgcgtcgccgacccgcctgcccgacggcacgctgctgcccatggaccccgggctggtcgaacacctgcgccgggccgcccacgacggcttgccgcaggccatgcgccagggctatgtcagcgacgatctcgaccagcgcctcgacggccagttgcacaccgccctcgacctgcccgccccggccaaccgcgccgtcaacctcagcgcgccggtatggctggccgaccgcctgttcgtccatgaccgcctgcaggccggcgaggtcccggacagggtcgccgacctggtggccgccagcgacttcgcgcacaccggcgagatgggcatgtccttcggcggctcgaccaccggcgcggtctgcatggtcgaccgacgctgcgcggcggccgtcaacctcgacggcggcgacttcgacttcgcgcccttcgatagcgatttcccggcgccgctgctgatgctgcacgccgaccttggcaacttctaccggctgttcggcatcgaaccgccgacccgcccgagaagcttcaacgacttttcctacgaacgcttcgagcacgccggccagcgccaggacattcatcgcctggtactgcgcgattcggcccatgccgggcttaccgacaatccgctgttcatccgccggccgctgcgcgacgggctgctcggctcggcaccgacggaagtcctcatccaggctcccaacgccctggtgctgggtttcttcgatcactacctgcgcggccgcgccaacgactttccgcaagcgcagatggcgcgcttccccgcctggctgacgcgctacgacaactcggcggtgcgcgactggtggctggccaagccggaagcccagcgcctggcgctgcgacaacgcatcgacgaaatgaaacggcgcaagaccgggctggatcttccctgacgacgggttacagtgggcgccccatctgcggagcgccgccccatgcatatcccgcccgagctgatcatccaccagacccgccactggacgctgaaccagcggatcgactcggccctgcccggctactgcatgctcggctcgcggcaaccggcgacggccttccaccaattgccggaacaagccctcgccgaattcgggccgctgctggccagggtcgagcgcgaaatggacgcgctgctgcggccgcgacgcatctatgtcggtcgctacggtcacatgcccggcctgccggtgcatttccacctgattccactgtacgactgggtcgaggaactgttctgggaggacacgcgctaccggacgctccagcagttcggcgtgccgaccgccgaaccccttaccgatggcgccgagctgaccctgttcgtctggcgcgaattctgcgaacgcgccgatccgccggccgtgcgcggcatggatcggcaacaggcgatcgccggattgcgccgggcattcggctacggcgtccaaccccgaacatcgcctgggccggactccgagcccgcgcagggcgcatgaccgcgtgcggttatccaccgtgaaacggatgggttccaaggccgtgtgggatgaataaccgcgtgcgattacccaccgtgaaacgggtgggcttcgaagccgcgtagggcgaataaccgcttgcggttatccgccatgaaacgccagcgcagcggcggataacgccggtggcgttattcgccctacggcccgactccggggccgcgggacgcatatccgccatgaaacgtcggcgcagcggtgtcgtcacggttgcaggtagcggtgcttccagcctccttcgtcgcggtcgtagcgcaggcgctcgtgcagccgctcggtgccgttgccccagaactccaccgactccaggcacagttcgaacaggcagtagcccggcgggcgcggcagcgggccgtcggtttccgccaggcgccgggcttcggcgcgcagggcgtggatgtcggcgagggtttcgctctgccgcgaggcgatcgacatcgggtgggtctggtacgggcggttcagccactgggcgtcggcgcgctcgtcgggcaggcgttcggcgcggccgttgaggatgatctgctggctgctctcgcgccagtacagcacccccgaggcccaggggttctgcgccagttcgcggcccttctggctatcggcgtgggtggcgaacaccaccccgcgctcgcccagctcggcgatcaccacgatccgcgtcgacggccggccctgcccgtcgaccgtggccagggccagtgcccgcggctcgcgcacaccatagcggcgggcgcgttccagccagttgcgcagcacctccatggggttcgccggcggcgcctcgaactccgggaaaggggcttcgatggtcccggtgagggactcggaaatgttcgcgttgacgcccatcacggcgttcctccgttctgcccgttcacaggtaggcccggccttcggcgaaggccgcgccgttgcccgacacttccaccgtcgagacccgctcgccggcgccctcggcgcgggcgtacatgcgcgacggccggccgatctcgacgccctggaggatctcgatctgctgcccgtagggaatctgccggtggcgcgccaggtggatcgccagcggcccggcggcggaaccggtggcggcgtcctcgaccacgccgtaggccggcgagaacatgcggctgcgccagtgccgcccggcgccggcgaagcagttcaccgccaggtccgggaagtcgcacagcgcgcggtggtcggggtgcagcgcggacagcgcggcgacgctctccaggccgacgaacacgtggcgcgggccgttgcggtagacctcgatgggaaaggtcgagcccttcaggccgagggcggcgagcagctcggccggtcggctgaagtgctcccaggtggggatcggctgctgcatgctgcaggccaccaccttgccgtcctggcgctccagggcgaagggcacggtgcccatcctggtctccaggaacagcctgtccttgtcggtctcggcgcccagggcgatggcggtgcccagcagcgggtggccggcgaacggcagttcgttgaccggggtgaagatgcggatgcgcgcgtcgccgtcctgttgcgggcggagcacgaaggtgctctccgacaggttcatctcccgcgccatgcgctgcatgcgctcgccgctgaggtcgtcgcagtcgaagaacaccgccaccgggttgccttgcagcggttcgctggcgaaggcgtctatcacgacatatctgtgcatgggctctcctggctcagggccgccgctcgaccagcgcgtgacgcagcaggtcggcgatgatgcgcggaccctcgcgggtcagcaccgattcggggtggaattgcatggaggcgaagcgcggcccgcgcagggcatggacctcgccggtctcgcggtcgcggctgatctcgatcgggccgacctcgggaatctcgatgcggtcctgcagggcgcgcgcggcgaaggtgttgtagaagccgacgcgctcggcggcgccgaacaggtcgatctgtttctgcacgccctggttgggctcctgccggcgttgcaggtccaggcccaggcacaggctcagcacctggtggctcaggcacacggcgaggaacggccggcgctcgctgagcagcgaacggatggccaggtgcaggtggccgatcttcggctggccgatctcggtggggttgcccgggccggggcccatgatcaccaggtcgtagccgtcgaacgagtacggctcctggaagccgcgcacggtcaccgtcaggcccagcgacttgagctgcttggcgatcatcgaggtgaaggtgtcctcggcatcgacgatcagcacctcgcgtccggacaggtcggcctgcaactgctggcgctcgctggcgccgcgcagccagaagtcggcgatcggcgcgttgcggctggccagcgccgccaccacgtgcgggtgcgagcccaggcgctgcggcgcctggctcttcagcgcggcgatcagcccggaagccttggcccggctttccgccgcctcgcccaggggatcggagtgacgcacgatggtcgagccgacgccgatgcgcaggcggccgtcgccctcgatctcggcggtgcggatcaggatcgccgagtccagcgtgcgcccgccctggccgtcaccgccgatcagcgccgccaccccgctgtagtagccgcgaccctgcggctcgtagcggcggatcacccggcaggcgctttccagcgggctgccggtgacggtcggggcgaacagcgtctcgcgcagcacctcgcgcacgtcgcggctggtctggccctcgatgaagtactcggtgtgcgccaggtgcgccatctccttgaggtagggaccgagcacccggccgccgtcctcgcagatccgcgccatcatcttcagctcctcgtccaccaccatgtacagctcgtcggcttccttgcggttgtcgaggaattccatgacctcggccaggttcggcccggccggcgggtagcggtaggtgccgctgatcgggttcatcaccgccaggccgtcgcgcacgctgatgtgtcgctcgggcgaggcgccgaccagggtgcgttcgccggtgtggacgatgaaggtccagtaggcgcccttctcgcgcagcagcaactggcggaagaagctcagcgcgctggccgtggcgtagccgtcgatgcgcgcctggaagcgccgcttgatcacgaagttggcgccttcgccgcgaccgatctcgtcggcgatgacccgcccgaccacttcggcgtaggcctcgtcgtcgaggtcgaaaccttcctcgctcagttccagcgcctggttcggcagcagcgccagggcctgctccagcggcagcagttcctgctccaggaccttcagcgccagcagcggcgtgccgtcgtcgagcgcctcgaagccgcgctcggcgatctgccggtagggaatcagcgccagcaggtcatggcgcggcaggcccgggccgggctcgtccagcggcaggtcggccaggccgtgcagttcgagcgcctcgccgcggatcacgtcgagcaggcccgggccattgctttccgggcggtagagcaaggcgaacggcgccggccgttcgagcaggcgctgcaacagcgatgtgggcagggcgttcattccagcacctcgtcggtggtgaccaccatcgcgcagcggctggcggcgtattccagggccatgcggtggtgcgcctcgctgaagtcggcgatggcgtcggccaccaggaacggctggatgtcgttggagtaggcgtcgaccgtggagatcagcaccccgacgtgggcgtatacgccgcacagcaccaactggtcgcggccggcggcgcgcatccgctggagcaggtcggagtggaagaaggcgctgtagcgccacttggtcagcagccagtcgtccggccccggcgccagctcctcgaccacctcgcggtcggccggactggcgcgcatgcccggcccccagaagtccttgagcagaccgcgctgctcctcggtcatgctgcccggctgggcggtgtaggcgatctgcacgccctgctcgacgcaccagcggcgcagccgcgcggcgttggccaccagctcggcgcgcaggctctcgggcagcgggcgcaggaagtagcgctgcatgtcgtgcaccagcagcaccgcgcgccgcggctccaggctccagcgcgccaggttggccggcaactgctgggcggtcggcaagggataggcggtgatttcgggaatgccgctcatgccacggtctccagggggaaggttgcgctcgggatcgcttctgcgccggaccaggccatcaccgcgctgagtgcctgccaggggttcagccgcggatcgcagaggctggtgtagtgccggctgacctggtgcaggccgctggaatcggcgacgcactcggtgacgtcgtccggggtggtctccaggtgcagcccggcggccacgccgccggagccggacaccgccaggcggaacgccgccacctcctcggcgatgctgcgcaccaggcgggtcttgttgccgcagggcgcgacgatggtgttgccgtgcatcgggtcgctcagccagatcaccgggtgcccggccgcgcgcaccgcctccaccagcggcggcaggcgctcgccgaccttctgcgcgcccatccgcgcgatcagcgtcaggcgccccggctcgcggcgcgggtcgagacgctcgcagagcgccagcaactggtcgcggccgatctccgggccgaccttgcaggccaccgggttgagcacctcggccagcagcgccacatgggcgccgtcgacctggcgggtgcgctcgccgatccacggccagtgggtcgaaccgagatagacccggcgctgctcgtcctcgcgcagcatcgacagctcgtagtcgagcagcagcatctcgtggctggtccagaccggcgaggcattcgcctcctgcccggacgcggcgtcccagcccaggtggcgcatgatgttgcgcgccgccgcgtagcccttgaggatccgctgcggatcggcccggcgctgctcggcatgggcctcgcggccgttgaccatgtcgccgcgatagaccggcagggtctgctcgccgacctgctcgtgcggcttggaacgcggcttggcgtactgcccggcgatgcgcccgacgcggatcaccggccgccggccggccaggcgcagggcgccggccagcagttccagcacggcggccttgcgcgccacgttctcggcatggtggtcgtccatgtcctcggcgcagtcgccgcactgcaccaccagcgcctcgccgcgggcgacccgcgccagggtcgcgcgcagggccaggatgtcgccggcgcggatcagcgccggactgccgcgcaggtacgcctgcacgtcgcgcaggcgcgacggatcgccccattcgggttgctgcagcgcttcgcagcgccgtacgcgttgcaatagatcgtccatggtgggtcccccttcggcaggagatatcgtttcgatcaagtgggaatgccttcgcgttttatttccgggaccggaatgctcaaggcgcgcaattgctggaagacgttcatgaattcgcggttgcgcttgatcttgccgtcttcaagttcgaaggaatgcaggaagtggttttcgtaataaccttcgggatatccggggaaaagaatcttgccgtgaccgtcgcattcgacccagaaatgattggggtcgtcggttccgaatatatttatgttgtaccactcccaatcgggaaagcacttcaatgaccagacggcatgttccgcaagtttgtctttgccacgaatgacgatgggcgagccggtatcggtggtccataaaccgccacagccgtcctcgacgaaaagttcatggcggcgcaggcgatcctggcctttggtgttcatatacttgaccaccgtctcgcgattcttcctgcgcaactccacggcgtcttcgaaaccttggggaatagcattatcgagcatcgtcatatctcctcttgaattggaatagacattaatcaggtgggaataccgtcacgttttatttgtggaacggctattcccaatgcacgcaatttctgcattgggttcatgaactcgcgattgcgttttatccggccgttctcgagttcgaaggaatggatgtagtggttctcgcaatagccctccggataccccgggaccagcgccttgccgcgcccgtcgcactcgacccagaagtggttcggatcctcggtctcgaagatccgcacgttgtgccactcccagtcggggaagcagcgctcgagccactcggcgagccgcctgaggctctcatggccccggaaaaccaggggttcgccgctttccgtggtccagttgccggcgcagccgtcctcgacgaacaggctgtgccgctgcaaccgttcggcccccttcatgcgcatgtagtgctcgaccgtggcacggttgcgccgacgcaattccaggttgtcggtaaaccctttcaaccgttggtactctcgcatggtgcgaatctccgccagttcgaatcgactggcatccataccggaaagaagacatcgggatgacaggccggagaaattgccgtgaagctttttccgggcagaagttgcccgcttcggagcatctccaaagtttcaactaatgccgaattgccatgaccgaatgtttcgcctgaaacccagttgtaaccagatttgacaggggacaaacttataaacgcttttttgcaatagccataaccccttaaaaattacaggtgtggggcatcgattccgttctattctttggccggtttgccaagcgcccggaaagttgcactagcgtgccggacaacaggaggacgggcgcaatggcgaagggggcagcggggaaacgctgccggtgggaaggctgcgctcaggcgaccggcgcaaacgctatccggccattcggtgaatggccggacgcttgcgcggcggcctcgctaggcgacgaggcgtcgattcagttgagcaggccgatggcgtaagccttcatggtggcctccgccttgttgctggagttgagcttgcgcatcgcattgacgatatggaacttcaccgtgcgctggtcgatcgacaggatcaggccgatctcgccgtaggtcttgcccaccgcggtccacttgagcatctcggtttccctggcggtcaggcgcacattgctttccgggacgatgcgcggcgccagcaggtcgccgaaggtagcctgcagcatgctggtgatccagagcaggaaggattccttctccaggatttccgtggcggcgatgctctcgctggaacgcaccagggacagcatgctgatcagcccgtacttgccgcggaccgggatcgaccagccgtgacggatgccgtgatgcagcgcttcctcccagaagaaacggttctcctggaagtcttcgccattccagatcagcggggtgtattccagaagaccatggcgcacgatcgggtcgatggatgtgtagtcttcggagatatatctgcttttccattcccctgggtaattggacaagaaatgatatttaggtgcggtcagcgggaaaggcgcccgcgcaccgaatgaaaagaattcgaatccataattaccgcatatctcgagaaccagggagaagaactcttcctcggttgttattcttgacaaaatctcgagatatccctctctctcatcatgcatgccagcttcaccagtcaacaatcgatcccggcaggattcggttcttcagcgtttttattcttttttgtttccgtcttatccactcatgacaattccctttatcaagccggacctggaagtacatatcgccaccggccctgtgcgggtgttccggacgaggtctagcccattcgccgcccgccgggcgacgacgaaacgaggctgaagagaacttctcgatgagcacggacacgaggcgccgcgcaggaactgcgctgggctggaggggacggcgccccggatctttgcggaaaccgtaaaacggctctccgatgggcctcacggcggtctttctcattgttcttctcgcacgctccatcgtcgtcgggagagcctcccgacaacaaaccttggcccatggcgggcctcgtcgacgaggctccccggggaccagaaatggcaactacatacttccccccctatctctccgcagatacctgcccggaagggcaggttgtccctgccgggctgtgacaatttaattcgaccaggcatttcattgtccgtgccgattttcacgaagcgcattctgaggcaattaaaaagagcgctccattcgaccatggacaagctatccacgcctgaccgagatcgccttccgaatatagcgaagcgataaccgcagcctgccgagaagtgcttcagacaataaacaggacgctggcctttcgtatcgatgaaagttccgcatggcgtccgcccctaaggaagaggagataaatatgatttattacttgatcggagtggcgctattcatcttcatgctggaacagttggttcccggctggaaattgcccaaggtgagcacctgggtggcccgggtgattttcctcaacatcgtccaggtgtcgatcgccctgctcgccggcatcacctggaacaaatggatgatggggcacagcctgctgcacacctcggatgccctgccaccactgctggccggcttcgccgcctacttcgtcaacaccttcgtcacctactggtggcatcgcgcgcgccacgccaacgacacgctctggcggctgttccaccagttgcaccacgcgccgcaacgcatcgaggtattcacctccttctacaagcatccgaccgagatggtcttcaactcgctgctgggcagcttcgtcgcctacgtggtgatgggcatcagcatcgaggccggcgcctactacatcatgttcgccgcgctcggcgagatgttctaccactcgaacctgcgcaccccgcacgtcctcggctacctgttccagcgcccggagatgcaccgcatccaccaccagcgcgaccgccacgagtgcaactacagcgacttcccgatctgggacatgttgttcggcacctacgagaacccccgccgcatcgacgagccgcagggcttcgccggcgacaaggagcagcagttcgtcgacatgctgctgttccgcgacgtgcacagcctccccggaaaaacccagcccgctcccgtcctggtcaagcccgacgtcaggtgaacgccatgattccagacatcgattcccgtctcagccggaacatattgaaatccatctcgtatggcctccccctcgccgaagtggtccccgaccatacctatgcgcaactggaaacgcgcctcggcgaactgaaacgcaggtatctggagctgcgcatctcccacggcgcgcgcgagctgccgttcagcaactacctgttctacctgatcctccagtcgcgccaccaggaattcgacttcaagctgcgccagggcaactcggtggtcaccaacatccaccgcttcaagagcaagggacgcatcccgtccctgaccaccctgctcctggccgatgcggtcaacgccaagagcgagctggagctcaagcatccggacatcccgcagctcgaccgccacgctcgcgacatcgagcgctggctggccgccggcaacgtcatgccgcccagcgagcgggccctgcgcggcctggttgaggcgctggagcgcgccgctggcgaaggccgtccgttgcacctggtgagcgcggtatgcccggactactcgcactccagcgatgccgagggcaagccgcgctacaccttcgagcgagtcggcgaccagcccggcctggccggcgccaagctggtcagcgccggccaggcggtggcggagctggccagggcgcgccaggtggagatccgccacgcgatcctcggcggcgagttcgaatacctgtcgttcaaccgcaaccccgccaccggcgagacccgcgagggtttcctcggcaaggtcgagcgccagctcgagcggatcgccggggccctgccctgcccggccgcgacctgctcgttcttcgagatgtgcggcggcgaggacggctggcaccgggcccacggcgagatcgtccagcgcctggaacagggcgactacggccagaccgggctggactacccggccctggaatcgatcttcctgtcgcgcctgccgctctacgagaaatggttcgccagccagtcgcgcgagcagatctgggccagcttcgtctcccaggccgccgagtacgcattgatgggaaaactcttcggcgagcgcttcgacaacttcgtcgtgctggccgtcgatcactaccggatggagccgttctactcgttcttcgcgaccgtcccgacgctctacatccgaaccgactacctgtaacgagggagcgcctgcgccatgcaagatgaactgttcaagacccgatactccaagtacggatacggcatcgacgtgcgccgtacctacaaggacctgccctgccagccgttctggacctgggtcaccggcaagtcgctgaacgaccgcccgccgcgacggccgaaagacaccctgctcaagccctggcagctctacctgcacatcagttggggctacgcggtgttcttcctcgcggtgatctacggccagcaactgctcgcctcgcagcagccattgtggctgaagtgcctgctgggcgcgctgatcatgtgcctggtggtcaaccgccagcgtggcttcctccataccttccactacaccacccatggcgccagcctggagaacaaggcgctggcccgcttcacctgcaagtggatcctgtcgatcccgatcctgcacaccccgcgcgacgagtacgtgaagctgcacgtgaacgaacaccacagcgtgcgcaccttcaataccgagcacgacgtcgacctggtcttcatgaaacagcacggcttctacaagggcatgtccgagagcgccttctggacccgcctggtgctcgcgcccttccatccggcgcggatcctcgagcacctgaagttccgtttcgacgtcagcttcgtctccgccccgcgccacgagcgcgtcagccgggcgctctactgggctgcgctgctcggcctggtgtacgccagcggctacctggaggcgttcgcgctgttctacctgttcccgatcttcatcctcacccagtactcgtcgtggatccagcacgtctccgagcacctctggttcgcccgcaacgagcacggcctgccgcgcttcctgcactacggctcgctgagctggggacgcttcctcggccgcccctacccggccgacaagcagggcctggccttcgccctggcgttcgttcgctggagcctgggcgtgctgctgatcgacatcccgctgcgggtgttctccttcatgcaggacctgcccagccacgacttccaccatcgcaagccgggagtgaacttctggcgcatcgcgccggagcgcgcggccaacgaggcgcgcccctcgaagttcggcccgatgaccgagacctggggcatgtgggagaacttcctgatcctgcgcgaccacctctgccgcggccagtcggacccgttcggaatcgtcgactggtaccgcgagaaccatgcccggctcgctccggagaccgatgccgccaaccagccccacaccaaccaacccgcatcccaggctaccgcctgatcacacaggaaaccccatgaatactcagattgcccagatcacccagagcctggcagccaacggctgcgcctatatcacccccagcgacgcgctctacgacgagcaggactgggaactgatgaaccaggtcctggccaactcgaccctgccgtgggagaagatcctgatcggcgacgccgacgaggagaacgacctctacgtggcccgtttcatgaccgaccgcgaccgtcccacggtggtcaaccatgcgctgtcggagctgatcatcccgcgcgtctgcaacgacaacgtgatgagcctgttccgcaagctgatgggcgacgacgccttctacgtgcggcgcatgcaggtgaaccggatgaaggccggctcgttcatcggccggcacctggataccgacagcaacccggactaccagtactccatcgtcctgcagctcggcacctacttctccggcggccagttcgtggtctacgaccgcgacggcaacctgcgcaacgacatcaagccggagccacgctcggtgatcatcagcgattgcagctatccccacgaggtccagcgggtgaccgccggcgagcgcgtctcgctggtgttcttcgtcagtcgccatgcggaccggaaccggcgggtctattgacccgtcggcgtggagactcgaagcgatgtcgaagaacgcacgttacgcctggcgcctgtccctcggcggcctgctgctggggctactggcctgcgcggtctacctgctggccgtcccgctgggcttcaagtacggcgagatccaggtcggccatggcctggaacacgaggggcggatcgcctgggacgccgccggcgtcccgcatatccgcgcgcagagcctggaggacggctatttcctgctcggctacagccacgccagggatcgcctgtggcagatggagttcgcccgccgctatgccggcgggacgctctccgaagtgttcggcgccaagaccctgccgatggacaggttcgcccgcaccctgggcttccggcgcaccgccgagggcatctacgccaacctggacgcgcccacgcgcgtcctgctgcaacgctacagcgacgggatcaacgcctacctggagctggccccggcggcgctgccgctggaattcagcctggtgcgccacgagcggccggggccctgggggccggtggacagcctgtccctgcacctgctctattcctggaccctgagcgccaacctgggcatgcagttgcagcgcctggcgctggccgagcacctggacctggcgcggatcaacgaggtgttcgccccctatccgggcgagcggccgccggccacccgcgactacgccagcctgtaccgctccctgcacggcacgccggacgccggcaagctgctggggcaactgcccggttccaacgtcgagggcatcggttcgaacaactgggtggtctccgccagccgcagcgccaccggcaagccgctgctggccaacgatccgcacctgcgcctgaccaacccggcggccttctacctggccagcctgaaaatccccggcctgagcctcaccggcgccaacttcgccggcgccccgctgttcgtcatcggccataaccagcgcatcgcctggggctacaccaataccggctcgcacatccaggacgcctacctggagcgcgtcgatccccaggacccgcggcgctacctgaccccggacggctaccggcccttcgagacgcgcctggaacgcatcgccgtgcgcgacggcgagccggtctcgctggaggtccgcagcacccgccacggcccggtgatcagcgacatctacgaaccggcgcggctgccgcaggcgcagcgcgaccggctggtgatcgccctcgcctggaccggcctcgaccatcacgacaagaccttcccgagcctgctggcgatcaaccgggccgaaggctgggaacagttcctcgacgccgccgccgacttcggcgtaccgccgcagaacatggtctatgccgacgtcgagggcaacatcggctacgtctccgccggtcgcgtaccgctccgcggcgccgacgacgacctccatggcctggccccctcgcccggctgggagagccgctacgactgggtcggctacgttccggaaagcgccaagccacgcagcctcaacccccgcgaagggttcatcgccacggcgaaccagcgcatcgtgccgcccgacaatgccttcgacttcggccacgactgggtcctgccctaccgctatgaccgcatccgcgagtggctcggcggccccggccagcgcaccctggaagacagcctggagttgcagaacgacgagttctccagcgtgatggcgagcctgttgccgaagatgctggagcaggtcagcgaccccgaactgcgcgccagcgaggccttcgccctgctccagggctggaaccaccaggccgccgccgacctggccgcgccactgatcgccggctactgggtacgcgccttcacccgcgagctgctgcaaccgaggatcggcacgcagttgctggccagcggctggaaccagcgcaactacgacggattcctccggctgatcctcgacggccaggccgacctgcgcttctggtgcggccaggaacaaggctgcgacctcaagctgaaccagtcgttgcgccgcgccctcgacgaactgcgtgccgcccacggaagcgcgccgagcggctggaagtggggcgaggcgcacgccgccctcgccgagcacgtgcccttccacaagaccccgctgcgcgcgctgttcgacctgaagaacaacaagggcggcgacaacttcagcgtcaacgtcgggcgcttcgactacagcgacccggccaacccgttcaacacccggatcgccgcgaccctgcggatggtcatcgacctggcggacttcgacaactcgcgctacgcgctgtccacccgcaactccggcctgccgttcgacggcgccaccgacctcaacgaactctgggcccgcggcgcgtacatccgtatcgccgacgacgcccccgacgcgacggaccgccagttggtcctgcgcccttcagcctcttcctccggcgagccacgaccatgaccagcgatccgcagaaaaacgccttcgacctcgactactccagccgcgaacggcagttccccgagggcttcaagcgcaagatagtcgccgacctgcaagagggaatgccgcagttcgacgtgctgcaatacttcggcaaccagccggatatcttcgagacctacgaccacctggtattggcgaccgacccggagggcgaacggatcattggcatcctgggcgcgaaggacttcgtccgcggctcgacgcgcttcctctacctgtggacggcgatggtggtcgaccgctaccaccgcaccagcctgttcaagcggatcaaccagttcttcctgcgccaggtcagcgagcgcaacggcgggctgccgccgctgatcgtggcgaagacctacaacccggtggtctacaacatgttccgcgccctcagcgcgcggattccgggagcgacgctgtacccggacctggaagcgccgcgccagagcccggacatggtcgacctggccctcgacgtggtcggcacgctgtccgccaacctgcgcctggatgcggaaaccggcctgatacccggcgggcaacgcagcgtcgccccggatttcttcccgcgcatggcgatgtccagccacgccaggaccaacgaccacttcgtcgcccacgtcggcagcagcgaccagatcctctgcatggtccgcctcgcgcccggtgccgaaccctacgtgcagcagaggatcatccggtgagcggactcgcgcagcgctccgacgacccgtggctggcggcgctgccggccgcggtgctctacggcgcctgggcggcctatgccaaccaggacggcggcctggccgggatgggcgtcgccgccctgctccagggcgccgcgagtctcctggcgacgcgcttcggcctgtacctgttgcaatgtctcggccgccgccacggccttgcgcaacgccaggcgcccctgctggtggtgctcctgctgaccgcgccgatggccgcgctgcactggctctcgggcacgccgcatccattggcgagcgtggcgccatcgttcgtcatcggctggctctacttcgccctctgggcgcgccgccgcccgggccgccggcaagccagcggagcctagccggcgcccccgctcgagccgctccccgtcggcgggatcggcccgtatactcggagccttcctatccgcccaaggacgcgccatcgccatgctggagattctcggaaaggcctcttcgatcaacgtgcgcaaggtgctctggacctgcgccgaactggacctgccctaccgccgcgaagactggggcagcggcttccgcgacacccacgcggcggagttcctcgccctcaacccgaacgccatggtgccggtgctgcgcgacggcgaactggtgctctgggaatccaacagcatcatccgctacctggccaaccgctatgccggcgaacgcctctatccgcagcaggcggcgccgcgcgcgcgggtcgaccagtggctggactggcaggcctccgacctcaaccgctcgtggagctatgccttcatgagtctggtccggcagtcgccggcgcaccgcgacgcggcccaggtggaggcttcgttgcgcggctggacgggcttcatggaaatcctcgagggacaactgctacgcaccggcgcctatgtcgccggcgagaccttcagcctggccgacatcgccatcggcctgtcggtcaaccgctggtacgagacgccgttcgagcatccgtcgctgccagcggtgcgcgcctattacgagcgcctcggcgcccgtcccggcttcctcgcccacggccgcaacggcgtaccctgagcgaggcgcgcgatcactggccgagcgccttgttcaggcgctgcgccagggcggtggtgttggcgccggcggtatccagcagcaggtagtcgtagtcggacttggccaccggggcgatgcggtattgcaggacgccctcgaccacctgctggccggccggcacgctgagggtgccgacgcaggacagcacaccgctgtcgggatccttctcgaggatcgccacgtcgcgcagcgcgctgtccttgaactccggcgagcgctcggtgatcgcgccctggaggaagatccgcatcagttggtctttcacgtccggcgaggcacaggcctcggcctccttcttcgcgcaggcgctcaacagcagcgcggcgcccaatacagcgagcacgggtagcttcatcatcccctcgggggttggttggtgatgcgcagttggactgcgccgccggcgaatgattcccaggccccgcgcggcgcctgccgcagccagcactggccagccggcgcgtctgccagtagtctgtccgccgcgctggcgacgccggccccacgccaactggagcaagacatgtaccgagacaccgtgaccctcaccgtcagcgccgagcaacgcggccgcgaaagcgaggccgtggacaacccgaacgtcgccatcggcctggaaagcgtcgagccgggcgtgctcaagctgcacttcgaaggccagctggacgccccggagaacgctacccacatctgcttcagcctgaccatcggcctcacctactacggcccgatcctcgacggcgcggccagcgagaacggcggctggatgaccttcgagagcgacatgctcgacccggcgcaactggcctgatcgactctccttcgcagccatccaccatgcggaaggctgcgaagtggcactttgacacccatcccccggcggtctatagacagttgcagaacagacacggaagtggtggttcagcatgtcaacgtcttcgacagttcgccccacgacgagcctttccgggatatcccaggcccgcttccaggggaccctgacacacgcctccccagcctttcgcgggacgacttctccgcctgcgctctcccatcccccatgacagcacccggccggcgacacgggcaccgacagcgccagagcgtaccgaccggcctgcgtaacgggtagcgaccggtcgagttctggcgcgccggaaaagaatctccacgcgggaatcgtcatgaaaatactcgcccttctcgcagcctgcctgctggcaggctgcgccgccaacgccccgctgcgcgatgacagcgaatcgacctgcgccgacatgcggccttgcagcgacagctactacgaacgccatccgaactacgagatcggcttcgtcgaatacagcgagcgcggcaacgacttcgcgcctgccagaacgcaacgcctgatcgaccagctaaagcgctactccgcccggggggacatcgccatggtggtgttcattcacggttggaagcacaacgcgggacgggacgacggcaacgtcgccagcttcaacaaggcactcgccaatctcgcctcctccggggtgctgggcaaacgcaggctggtcggcctctatgttggctggcggggcaagtcgatgcatggcctgtatagcgagaacctgacctactgggacaggaaggccgtcgccgaggaagtcggccggggtggcgtcgccgagttgctcgcccagttggaacggatcgatcgcaaggacaggaactatctggtgatcgtcggccacagcttcggcggcgcaatcaccctcggcgcacttcacgacccgttgctcgaacgcctgctggctctgcaggacggtcagcggatacgcgccttcggcgacgcggtaatcatgctgaatccggcgatagaggccaatcagggcctgttgctcaaggagaacagcctcaaggtcggcgccctgggagcccggccgccgccgctgctgtacgtcatcagttcccacggcgacagcgccacccacttcgccttcccgctcggccaatgggtcggcgtcaacctcacctggagccaggtggacctggacaggacctacaacggaacccgctatcgcctccgggaagaagacctggataccaccgccctcggcaactacagcctgtatcggaccgccctgctgatcgaccgcgagtgcccgctgccggatggcagcgacaactgcgcgccaagaccgcccgaaccacgggtgatcgacgacaccgatatcggcaaatggcgcttcaggagcttctgcagcgcggacggcggcaacgccgatccggcgctgccgcgcatgccctgctacagcaacgagccggtcaacttcatctacacctcgcagtccttcatcgccgaccacaacgatatcttcaacgaccaggtgatcgccttcatggccaccgccgtcagcaaggccatctacgaacgtacggctggcgcctcctactaccgggagtgccacgacccggtgcggaagaacttctcgttcggcaagtgcttcgacttccactacctcaaagccacggccatgcaccggcggctgcaacggcaactctcggaacccggcacccgcagcgaacaggacgtcctctatgaacaccctctctagcctgctcctgatcggcttcgccgtcgttctgctcgccccgcggatggcgcccgccgccagcgccgccgaagacaaggccacctattgcggctccggcttcacccagtatctggttccggacgacgtcgcgggctgctcgctcagcgaggcctgccgcctgcacgatatctgctacggccgctgcgacaaggacggcgacctctacggcagcgcctactgcgcgcaaagcgaaaagtccgaagcccgcaacatgagcaagcagcagtgcgacgccaggctgcaggccgacatcgccgcacagaacggcaacagccgcctgtgccgcgcggtgggaggcgtctaccgggtattcgtgaagcacctggggcaaggtccgttcaatggccgggaggcactggacatctacctgaaggtcatgcaatcggcgcccagcgcagccgacgccgacgcccgcctcgaagccatccatcaactacagaagcagggcctgaccaacgccaaggaaatccgttacgacgccgagcgtatcgtcatcccactcaacaggcccgtggaatcgccgttgaccaacggctcggacactctcgtcctgccgcgcaacctcgaccgagaacggctgcgccagctggaccagcggctcatccgccaatgagcctcagaatagtgccatctgccggtcgaccaaagtggcgaaatcatcgccgacgaacggcaggatggcgtcggccaccggctgcaactgcttgcccacgtagtgctcgtagtcgatggccgaacgccgcgcctcgagcggctcgggaccggcgacgctgatcacgtagctgatccagccgccgctctggtactgccgcgggcgcccgcgctcgaggttgtagtcgtcggcgatgcgcgccgcgcgcacatgcggcggcacgttgcgctggtaatcgtcgaggcgccggcgcaggcgcttgcggtagaccagcaggtcgtccagctcgccggccagggtccgtcgtacgtaatcgcgcacgtagtcctggtagggctggcgattgaagatgcgcaggtagagttcctgctggaagcgctgggccagcggcgaccagtcggtgcgcacggtctccaggcccttgaagaccatctcctcgccaccgtcggcgcggcgcaccaggccggcgtagcgtttcttgctgccctcctcggcgccgcgcacggtgggcatgagaaaacgccggtaatgggtctcgaattgcagctcgagggcgctgtcgaggccgaattcttctttcaggtgctcgcgccaccagtcgttgacccgcgccaccagcgcccggccgatggccgcggcctcctcctcggcgcgggggctgccgagccagacgaaggtggagtcggtatcgccatagatcaccgtatagccctcggcctcgatcagctcgcgggtacggcgcatgatccgatgcccgcgcagggtgatggacgaggccaggcgcgggtcgaagaagcggcagccgctggaacccagcaccccgtagaaggcgttcatgatgatcttcaacgcctgcgagagcggctggttgcgttcgcgcttggccgcctcgcggccctcccagacccgtgcgacgatggccggcaggcaatgccgggtacgcgagaagcgggcgccgcgaaagccttccaccgagtgctcgtcgtccggctggcgcaggccttccaccaggccgaccgggtcgatcaggaaggtacggatgatcgacggatacaggctcttgtagtcgagcaccagcaccgattcgtagaggcccggccgcgagtccatgacgaagccgccgggactggcttccgggcgcttctcgccgaggttcggggcgacgaagccggcacggtgcatcaacggcatgtacaggtgggtgaaggccgccaccgagccgccgctgcggtccgccggcaggccggtgacagtggcccgttcgaggaggaagtcgagcagttcggtacgggcgaagatccgcgtcaccagttcacagtccttcaggttgtaatgcgccagggccggcttgtcctcggcgaacatgcgatcgatctcgtccatccgctggtacggattgtcgatcgccttgccttcgccgagcagggtccgggcgacgttctccaggctgaacgagggaaaactccaggtcgccgagcgcagcgcctcgatgccatcgatgatcaggcggccggccgccgcggcgaaaaagtggttgttgcggctgccgtgctcgcgccagcccatttcgtcgccgccacgccccaggcgcagcggcaccttcaggcgctgggcatgctcatgcaggacgcgcaggtcgaactgcaccaggttccagccgatgatggcgtcgggatcgtgctcggccagccactggttgagacgttccagcagcccggcacggctgtcgcaatagtcgaggcggaaatccacggccgcggcatcgccgttggccgggccgagcatgtatacctggcgctggccgcagccttccagggcgatggagtagagatcgccgcgggcgttggtctcgatgtccagcgacaccaggcgcaggcgcgggcgatagtccggagccggcttcaggcgccgggcgagcaggctgccgtcggcctcgacactcgcctccaggctgaccggcgcggtgatgaagcgctccatcaggtagcgctccggcggccggatatcggcctcgaacacctcgacgccggcctggcgcaagcgtttctccagattcatcagttggcgatgctgctggcagtacaggccgagcaccggccgctgctggaagtcgcgcagcgccagcggccgcagctcggcgccagtctccccggcgagcagggactcgacgcgcccgcgctgctcggcgaggacgaacgccaccgacggctgcggcggcagccgcacctgccgcgggccctgctcggtcgccagccagaacgcgacttccgtgccggccggcgtatcgcgccagtgccgggtcaggacgaacccttgcagtaactccaccatcgaccccgaatctctcgcatccgccgattctacccggcctgccttgggaacgctggcatcttcggtcagccggcagcagccaggcgcttgtagaaataggtggtgggacagggcgtgccgtccggcatcagggcgtagtccgggatttccccgacccgtgtccagccggtcttcaggtacagccgttcggcggcgctgccgctgaccgtgtccagcaccagcagggacttgccgcaggcccgggcgagccggtccagctcgcccatcagcgcctcgccgatgccgcgccgacgcgcacgccggtgcaccagcatcttcgccacgtcggcgcggtgcggctggttcggcggttggtcgaggagcagttgcacggtaccgacgatccgcccctccgcttccgccaccagcagcaggcgttcatcgcccgccacgctctcgccgacgccgcgccagaaagccagcgcccgctcccgcggcaacggccacatgaagctgaccgaagccccgccttccacgcagtccagcagtacctcggccagttcgtccaggcgcgccaggatctcctcgccagccaggcggcgaatcgtcggttcggtcatcgcgggcaagctccaatgcaagggcgaatttccaatatattggacagtgactatcatggacgagaaaaatccgccagggccactcatggatatcgacgaactgattgcccgacgcctagccgccctgcgcaaggagcgcgagctgaccctcgcccaactggccgaacgctgcgcggtgagcaaggcgatgatctcgcgcatcgagcgcaaccaaagcagccccaccgccagcgtcctcggccgtctcgccggcggcctgggggtcgccctctccgagctgctcggcgacgcgcaggcgccggccgaaccgctctgccggcgcgcgcagcaggaagtgtgggaagacccggccagcggctaccgccgccgccaggtcggcgctctcgatccgcgcagcggctgcgagatggtggaagtggagatcccggcgaacgcccgcctcgactatccccgctggggcggccggccctaccggcagcgcctgtggctggtcgagggtgcgctgcgggtggattacggcgagcagtcgttccacctgcagcgcggcgaccgcctggacttcggcgtcgaccgcgcggtgaccttcgccaccgccgggcaagcctgccgctacctgctggtgatcctccacgactagtcgtgcggcttattccgccggcgctccggcgaccagtcgagggcgccgacccggtgcaggtagaacagtccgaccagcagcagggagacgaacagcgtcgcctcgacgaaacccgcccagccattctcccgtagcgacaccgcccagaggtagaggaacggcatctcgatgccgaagatcacgaacagcatggcgaccaacgcgtacttgaccgagaagcgcacgcgcgacgagccggtggaatccacccccgactcgaacggcaggttcttcgcccggccatgcgatcggccgcccagcacccggcccaaccccagcatgagcaggcaaagggcgagcgcgccgaagaggtaggcgagcaaggcccaggtcgcgggagcgaaggatgtgtacatgatggtcgcccctcagccctgccgggtcgccagcttgagaatgacgatgccggccacgatcagccccaccgccagcagccgcaacgggctcgggctttcgccgaagagcaggatgcccagggcgaaggcgccgaccgcaccgatgccgacccagatggtgtaggccgtgccgaggggcagggttttcatggaaacggccagcaggccgaagctgaggatcatgaacagcagggtgaccaggcttggccacaggcgggtgaagccggccgactccttcatggccgtggcccagacgatttcgaagacaccggcgagcaagagatagatccacgccattttcagcctctctgcagggtcgtccccgcgcaatgaaagagggaaaacgggtcgtcccgcttccggctgaaagtgcgtgccgcccgggcgggcgtcagtcaccgacggcagcgatcctagcgcgttgccgatgccgggtgaacgcctgcgccgacggagttgtttcgccgcgtttccgcgccgtgcccgccgggacgctcggcaggattgatctagactttcgcaggatcgtgcaaggcgtccgtttcgtccttcgcgcacacttcgcccgatgcattcctgcctgataagagataacgccctgcccgggcctttccgtggagaatcagcatgcccacctcgctcgtcctgaacggcaagaacgtcaccctcgacgtcgatcccaacatgcccctgctctgggccatccgggaaagcgccggcctgcacggcaccaagttcggctgcggcatggcccagtgcggcgcctgcaccgtgcaactggacggcaccgcggtacgttcctgcgtgctgccggtctccgcggtcgccggcaagcgcgtcaccaccatcgagggtatccagagcaagcccggcaaggccgtgcaggacgcctgggtcaagctccaggtaccgcagtgcggctactgccagtccggccagatcatgtccgccaccgcgctgctggagcagaacgccagccccagcgacgccgacatcgatgccgcgatgaacggcaacatctgccgctgcgccgcctatgtgcggatccgcgccgccatccacgaagccgccgacaccctgaaggcctgacgccatgaacagcaagatcgatctgagcaacgcccttcccggctcgcgccgcggcttcctcaaaggcgccgcggtggtcggcctgaccatcggcttccagtggagcggagcccggcgtgccctcgccgcggccctgccggacgccggcttcgcgcccaacgccttcctgcggatcgctccggacgacagtgtcacggtgatcgccaagcacgtggagatgggccagggtgcctataccggtatcgccaccatcgtcgccgaggaactcgacgcggactggagcaaggtccgcgtggaaagcgcgcccgccgacgccaagcgctacgccaacctggccttcggcaccatgcagggcaccggcggcagttcggcgatggccaactcctggatgcaattgcgcgaggccggggccaaggcgcgcgcgatgctggtcgaggccgccgcccgccagtggcgagtgccggccaccgaactgcgcacccgcgacggcttcgtcgaacatccggccagccagcgcaaggccagctacggttcgctggccgctgcggcggcggaactgccggtgccggaaaaagtgcaattgaaggatcccaaggacttccgcctgatcggtcaccaggcgccgcgcgtcgacgttcccggcaagaccgacggcagtgcgcaattcaccctcgacgtcagcctgcccggcatgctggtcgccctgctccagcgcccgccgctgttcggcgccacggtgaaatcgttcgacgccacggcgaccagggcgattccgggggtggtcgaggtggtccaggtgccgcacggcgtggcggtggtcgccaagggcttctgggcggcgaagcaaggccgcgacgcgctcaaggtcgagtgggacgagagcaaggccgagaagcgtggttccgaggcgctgatggcggagtaccgcaagctcgccgagcaacccggcaagcccgcgcgcagggacggcgacgccgccaaggcggtggccggggcgacccgcaggatcgccgccagctacgagttcccgttcctcgcccatgcgccgatggagccgctggacgcggtggtcaggctgaccgccgacagctgcgagatctgggccggcgaccagttccagaccgtcgaccagggcaacgcggcgcgcaccgccgggctgaagccggagcaggtgaagatcaatacgctctacgccggcggcagcttcggccggcgcgccaacgcctggtcggactatatcgtcgaggcggtatcgatcgccaaggcgctgggcgccaacggcgtgccggtgaagctgcaatggacccgcgaggacgacatccacggcggtttctaccggccgatgtactaccaccggctcgaagccgggctcgacgccgacggcaagatggtcggctggcaacatcgcatcgtcggccagtcgatcctggaaggcacgccgttcgccgcggtgatggtcaaggacggcatcgacgccacctcggtggaaggcgccgccaacctgccctatgcggtgcccaatgtctcggtcgagctgagcaccacccaggtcggcgtgccggtcctgtggtggcgggtggtcggcagctcgcacacggtctacgcggtggaggcgttcatcgacgaggcggcgcaggccgccggcaaggacccctacctgttccgccgcgacctgctggcagagcagccgcgcctgcgcggcgtgctcgaactggctgtggaaaaggccggctgggacccgtccaggccgctgcccgccgggcgcgggcgcgggatcgcggtgaccgaggcattcaagaccttcgtcgcccaggtggtcgaggtctcggtggacaaggacggcaagctgaaggtcgagcgggtggtctgtgcggtggattgtggcatcccgatcaacccggacgtgatcgccgcgcagatggagggcggcatcggcttcggcctcggcgcgatcctgcacagcgcgatcaccctgaaggacggcaaggtcgagcagaacaacttcgacggctaccaggtgctgcggatcgccgagatgcccaaggtcgaagtgcacatcgtgccctccggcgaagcgcccaccggggtcggcgaacccggtgtggcgcccatcggcccggcgctggccaatgcgatcttcgccgccaccgggcaacgcctgtacaacctgcccttccccacctccttcgccaaggcctgagcgagacgcccgccggcagctccacggctgccggcgtggtgcgggcggccctccgaggatcgccgccgaccatacgggtccccccggtgtcgcgccgatttgcctccgcccggcgtcgggcgcagacttcagcgtccattcgcccgcgtagccaagcatgaccgagcctctcccttcttcgtccctgggccccgccctgcgtcgctggcgcctgctgcaccgggtcaagcaaacgcatgccgccgaattgctcggcgtggcgcaatcgaccatctcgcgctgggagtccggtacccaggcgctgctggtggaggaacgggcacgcctggagcgtctgctcggcgcccgcctggaagccgccgccgaccaggcactggcccgcctggtcgaggccaacccgcaacccgtgcacctgatctgcgacctcacccatcgcctgttggcctgttcgccggcacgcgccgcgcaattcggcgtgcctctcggcgaactgctcgaccgctcgctgtggccctattgcagcgaggaaatcctccgccaggaagccaccctcgaggaactcggctggcgcgaactgctggcaccgccggcgctggagttcgccagcggagcgaacgcctcggccatcgtgccgatccggcgcagccgttgccgctggacccgcatgaccctctcggacggacgcgcggtgcgcctggtggaaaccctctgaacgtcgccgcggatattttatccatggaccttcagcaccgccgcgcctaggcttgcaggctcgtttcaccggtagcggagcccgcgccatgtccctcgaactgctgagcaaccgcctcgaattcctccgcgaagccgaacgcctgaaagacgtcctgcgctccgcgcacacctcctccggccgcccggaaagcaccgccgaacatagctggcggctgtgcctgatggcactggccttcgaggaccaactggccggcctggacctcggcaaggtcctgcgcatgtgcgtggtccacgacctcggcgaagcgatccacggcgacatccccgccgtcgagcaggccgcgcacccggacaaaggcgaacaggaacgcgccgacctgttgcaactgacccgtcacctcgacgcgccgctgcgcgaccgcctgctcgccctgtgggacgaatacgagcgcggcgagtccgccgaagccctggcagtgaaggccctggacaagctggaaaccctgctccagcacacccagggcgacaatccggcggacttcgactatgccttcaacctcgactacggccgtcgctataccgaccgcgcaccgctgttcaagaccctgcgcgagctactcgacgccaggacccgacagcgcctcgcagctcggcgcgacgcctagcgtgcgcccgcccgggcagcgttaccagcgccaccgcctacgtagctcgccatggctacagggaagcggccggcacgtttccaccgaccggggcctgtcctgcacgcctcagtaaaggcgcgccttgatcagcggccgcagcaggtagttgagcacgctgcgcttgccgctgaggatgtccacctcggcgaccatccccggaatgatcggcaatacctcctcgccgcgcttcaactggctgccatcggtcttgatcagcacctggtagtaggactccttgccatgcggggtgtcctcctcgatggtgtcggcactgatctgctccagggtgcccttgaggtcgccgtagatggtgtagtcgtaggcggtgatcttcaccttggccggcatgccgggaaccaggaaggccacgtcgcgcggcttgatcttcgcctccaccagcagacgctcctctactgggatcacttccatgatcggctcgccgggctggatcaccccgccgcgggtgttgatcagcacggtgttcacccgcccgcgcactggcgacaggatctcggtgcggcgcaactggtcctggcgctgctggacaatcggttccagggcgctgagatcggccttgcgctgggcgcgctcggtataggcatcctggaaataggtgcttttcagctcggtcagcttgccgctgagggtggcgatgtcctggctcagcttgagcgcctccatctggctcaccgcacgcttggccaccagcgggcgaaccaggtcgagctggctctgcgccaggtgaatctgccgctggatcgcctgggtgccctccaccagtttgtcgcggcgtgacttgaatagctcgcgttcggaacgcgccagcggcccctcgggatcgacgtccggcgggaactcgatgctcttcttgcctagcacctcggcgtcgagccgggcaatggccgcgcgcagcacgctggcctggttcgccgactcctggaagttggtgaggaagcgcgtctcgtcgaggcgcaccagcggctggccgacttccaccaggtcgccctccttcaccagcaggcggtcgaggatgccgccctccaggctctggatcttctggatgcggctgaacggcacgacccgaccgtcgccgcgggtcacctcgtccagttgcgcccaggccgcccagccgatgaacagcagcacgcaaccgagcagggtccagagcagcggccggtagaccgggtgggtagccgccagcaacgggtcggccagttgccggcgcagggcggcggcgtcgcggtcagagtccatggttgcctccttcggcggcctgcggtgcctgtacctggttgccctgcaccacctgctccagcgggccgtccatgatcaccctgccctggcgcaggaccaccgcacgctcgaccagggcgagcatgcttttcttgtgggtggtgatgaccagggtgcgcttgcccaaccattgctgcaggtagtcgatgacctgtttctcgctgccctggtcgaaggccgcggtcggctcgtcgagcagcaggatcggagggtcctgtagcagcacccgggccagcccgacggcctggcgttggccgccggacaggctggcgttgccctggatcggcatgtccagccccagcgggtggccgcggacgaaggcgcccaggccgaccccgtcgagggtctccagcagttcctcgtcgcccagcgcggcgttctccaggttgaggttgtcgcgcaggctgccatggaacagcgccacgtcctgcggcaggtagccgataccgcgctggcggtcggccgggtcgatctgggtcaggctgacgtcgtccagcagcaggcgtcccgcctgcgcgtcgagcaggccgctgagcaggcgcagcagggtcgacttgccggcgccgttgccgccgagcagcgccacccgctcgccggcgcggatgttcagggcctgcacgtcgaccaccggcgggctgtcgccgtgggccaggcgcacgccctccaggcggtaatgtccctgcaggcgctccttgtgcacgaagcgcttgccctggggtcgctcctgctcggcgctcatcagttggtcgaggccttccatcgccaccttggtgtgctgccagcgaccgaggatgccggccgcctgcgacagcggtgcgatggcccgcgaggcgaggatcgagcaggccaccaggccgccgacggtcatcgcgccctcgctgatccgatagacgccgaagaccaccacgccgacgtagcagagctgctggacgatgctcgccgagtagctcagggtcgaggccagggtatgggtcttcatcgccgtaccggccagttcgccggtcagggtttcccactggtgcaggcagcggccttcggcgcgggtcgccttgaccgtctccaggtgctcgaaggcttccagcagcacgccgttcttcatcgccccttcgcgcaggttctgccgcgacaggtggccgagcaggcgctgggtcagcagccccggcaggatcatcagcacgcaggccaccagcggcacccagaccacatggccgccgatcacggcgatgatcagcaggaagatcgccacgaacggcaggtcgctgatcagcgccgcgctggacgaggtaaagaactcgcgcaccgactcgaactcccgcacctgggtactgaaggcgcccatcgacgccggcttggcggcgacccgggtgctcagcacgcgggagaacagcagggtcgagagttgcaggtcgaggcgcttgccgagcacgttgagcaggtggccgcgcatgatccgcaggacaccgtcgaggacgatcgccagggccacgccgctggcgaggatccacagggtgtcgaacgccgcgttgggcaccacgcggtcgtagacctgcatggcgaacagtgccgaggcgaccgccaggacgttggccaccaacgccgcggcggtgacctcggcgtaggaacgccagagccgcttgagcgggccgaagaaccagtgttcgggcaaggcgctggcgtagtcgccgacccgcccgtccgggcggtagcggcacttggcgaagaccgccgtgccgctgtacagcgcttccagctcggccagcggcatcctctggcttccgccgtcgctctgcggtaccagcacctcggcgtgctcgccgtcgttgcccaccagcaccagggcgcggccgtcgtcgagcagcagcagggccggcagcaggtagcgatcgatccggcgcaacggctggcgggtgacctgggcggtgatgtcggcgcggcgcaacgcgcgggccaccaggtgcaacggcaggcgaccgtgctccagcggcatgccgtccaccagttcggcgtcgccgagcggtcggccaagctgccggcagagcagcaacaagccctggcgcaacgggtcgacgatggggtcgtggttgaggatcacgacgttatccggggttttctcagcttccatgattcagccggttctccaatagcggacccaacaggccgacttgcgcggccgcccgatactcgatgcgcttgcgttcgatccgcaggttgatcagttgccgctctgcctcgaaccgctcgcgctgcacgttgagcaggtcgatcacgtcgcgccggccaacctcgaactgttcgcgatacaactcgccgacctgctccgactcggtcacctgctgggtcagcgactgttcccgccagcgcagcgtgtcgccgttgtcgaagaggttctgcagttgccggcggatgtcgcgctgcatcgcgtcggcgctccatttcgccgactccaggcgctgctgcgcggcggtcggccggcggaagttggaaagcccctggaaggtgtccatgcggaagcgcagggataccaccgagtcgctttccggatgcccgccgatctcccggcgcagcgcgctggcctccaggttcagttgcggcagcagcgacgccttggcctcgcggacctcggcctcggcgacattggcgtcctccagggccttgcgctgcaaaggcgattcgcggatcacccgcgccatatcgctggccgccaggtagcgttgcagcgacatcggctcgggctccaccaggtcggcgggctcctggccgaccaggatcgcgtactggttgcgcgcgtcctgcaggttgcccttctccagcgacaactgctcctgggcccgcgacagttccagattggcgcgatccagctcgctgcggtcggcgtagccgtcgccgccgcgcgcctgggtcatctcgcggatgccgtcgaggcgctggatgtgttcgcgcaccgcctccacccggcgctccgaggcaagcacgtcgaggtaggtctcgacgatatccagcgccgcatcgtcgcgcgccaccagcaccgcctcggacagcttgcgctgggtcgcgctggcgctgtcgaccttgctcgtcacccgaccccagtcgtacagcatctgcgacgcggtgagatcgtagacgatctcgccgaagtcgaactcctgcggccccccggacatcgtcacggaggggtagtacccccctttggccatctccacctcggtgcctgcacggtccgcttcggccatcgcggatcgtacttccgggtggatcgccagccctgccctgaccgcctggtcgaggggcatggccgacgcgaacatcggcagacccagggaaaggagccagatggctcccttcccatgccgccgtcccttgcgcgcgtactgcctgcgcccgcgcatcagaccacgacctgtaccgtgttgtcctcgatcagcagggtggtactgccgaaggtgtagacgtcgtaggtaatgccgttgatcagttgcgtggtaccggtattcaccgcgcccaccacgttcagggtgtcgttgttctcgccggtgatctgcaacgtgttgttggcatcggtgatggcatccacctccgccgcggtcagggtcagcacgctacccgagtcgcccttgccgaggtcgatgcgctcgaggttgctgagcgtgccgacgccgacggcgttgtagtcgaggtcgatgccgttggccaggaccagggtgtcgaacccggcgccgccatcgatgctgacgaaatcggtcgcggtgatctggatggtgtcgttgccgttgccggccaccacgtgatcgccggtgcccacgttgaagatcaggtcgctgccgtcgccgccgttgatgtgctccgaactgccgttggcgccggacagcacgtcgtcgccggaagtaccgttgacatcgatctggccgatattgagcgacagtccgttgggggtcagggtgatcccgtaggcggcgctgtcgttgccattggagtcggtggacaccaggttgaacgagatctgcgagccgaggttgaggatgtcggtgatgttcagccccaactgggtgaggatggtcgggctcagcaggttcagcgagaagtttccggacgaatccgcctggatcggcagcaattcgacgttcaacgccggggtgatgacccggatcaccacgctggagtcaggctcggtggttccgctgaaaccgaaacgcgggttcagcgggttgaggctgacgtcgaggccgaagttgccgatggtcaccggttgctcgatgctggtgccgacgccgatgctcgccgtgttgctcgggttgccggccgggtcgcgtccgaccaccgacacctgggcattgagcaactggtcccaactgaagtcgatgtccaggtcggtgagcaggttcagcgacgccagcccgctgttgtcggcggtcaccgtggcggtggcggtcaccccgccgacgtcgacggtgaccgtcaactcggtccctggctccgccgagatggtcaggatgttgccgaccaaggacagcaccggggtcgccggcggaatggtgtcgatggtgaacggcaccggggtcgacgcggtgccgccgttgatgtcggcggtgacggtcgaggcgccctccgggaacgggcccatgccgccgggaggcgtcagggtcagggtcaggttgccggcggcgatgtcgccggcggtgagggtatggctgacctcggcctcgtagccgttctgcccggcgaacttgaccgtgaccacctggccgacctgcatggtcggacggaccgtcacatcgacctggatgccgtcgccgatctccgcggcgttgatccaggtatcggcggcttccggcacgctgatggtcggcggcgccaggtccggcgcgttgatggtggccggcccgctgacgttgccggcggcgtccacggcaaccccggcgatcagttcgccggtgatcagcggcggcgcgaacggcaggctgaagttgccggcgccgtcgacggtgaccgtgatcgggttggcggtgtcgccgttgaccacgatacgcacctgactgttcggctcggcggtgccggtcagcagcgcgccgtcggcgctgatgctcagcagcggagcggacggcgccaccgagtccaccgtggtgctggccggaccgctggcgttgcccgcggcgtcttcggcgacggcgttgatcaccgtaccgttggccagcggcgtgccgggggtgaaggtccagttgccactgccgtcggcggtggtctcgccgatcgggttgccgttgccgtcggtgaggatcactttggcgccgacctcggcggtgccggtgatcacgctgccgttgctggcattgatcaccggcgtggccggcgccaccgtatccaccgtggtgctggccggaccgctggtattgccggccgggtcctgggccacggcgttgaccaccgtgccgttggccagcggcgtgcccggtgtgaaggtccagttgccgctaccgtcggcgagggtctggccgatcgggttgccattgccatcggtgaggatcacccggacgccgggttcggcggtgccgctgagttcgacaccattgctcgggtcgatcaccggggtggccggggccaccgcgtccaccgtggtgctgaccggaccgctggtgttgccggcggcgtcctgggccaccgcattgatcaccgtgccgttggtcagcggtgtgcccggagtgaagctccagttgccgctgccatcggcggtggcctgccctatcgggttgccgccgccgtcggtgaggatcaccgtggccccggcttcggcggtaccgctgatcaccgtaccgttgctcggatcgagcaccggggtggccggggctaccgagtccaccgtggtgctggccgggccgctggtgttgccggcggcgtcctgggccagcgcattgatcaccgagccgttggccagcggcgtgccgggcgtgaagctccagttgccgctgccgtcggcggtgacctggccgatcgggttgccgttgccgtcggtgaggatcaccgtggccccggcttccgccgtaccgctgatgacgactccattgctcggatcgatcaccggcgccggcggggcgatggcatcgacggtgacgctggccggaccgctggtattgccggccgggtcctgggccacggcgttgatcacggtgccgttggccagcggggtgctcggggtgaacgtccagttgccgctgccgtcggcggtggcctggccgatcgggttgccgccgccatcggtgaggatcaccgtcgcaccggcttccgcggtaccggcgatcacgctgccgttgctcgggtcgatcaccggcgcggccggcgccaccgcgtccaccgtggtgctgaccggaccgctggtgttgccggcggcgtcctgggccaccgcattgaccaccgtgccattggccagcggcgtgccgggcgtgaagctccagttgccgctgccatcggcggtgacctggccgatcgggttgccgttgccgtcggtgaggatcaccgtggcaccagcctcggcggtaccggcgatcacgctaccgttgctcggatcgatcaccggggctgctggcgccagcgagtcgacggtggcgctggtgggactgctgttgttgccggcggcgtcctgggccagcgcattgatcaccgagccgttggccagcggcgtgccgggcgtgaagctccagttgccgctgccgtcggcggtgacctggccgatcgggttgccgttgccgtcggtgaggatcaccgtggccccggcttccgccgtaccgctgatgaagactccattgctcggattgatcaccggcgccggcggggcgatggcatcgacggtgacgctggccggaccgctggtattgccggccgggtcctgggccacggcgttgatcacggtgccgttggccagcggggtgctcggggtgaacgtccagttgccgctgccgtcggcggtggcctggccgatcgggttgccgccgccatcggtgaggatcaccgtcgcgccggcctccgcggtaccgcttatctcggtgccgttgctcggatcgatcaccggcgccgccggggccacgccatccaccgtgatcaccgccggcgcactgtcgacattgcttgggctgcgcgccaccacgttgaccaccgtgccatccggcagcgggatgcctggagtgaaggaccagttgccgctgccgtcggcggtgacctggccaatcgggttgccgttgccatcggtgatgatgatggtgttgccggcgtccgcggtgccgctgatcaccgaaccgttgctcggatccacctgcgggatcgacggcagcgaggaatccaccgtcgtggtagcgggaaggctggtattgccggcggcgtcgctcgcggtcacgttgaccacggtgccgttgggcagttgcgagccgggcgtgaagctccagttgccgctgccatcggcggtggtctggccgatcgggttgccgttgccgtcggtcaaggtcacggtgctgcccggctcggcggtaccgttgagcaggttgccgttgctcggattgaccacaggcgtgttcggcgccaccgcgtccacggtagtgctgccctgcgggccggtattgcccgcagggtcctgggccacggcgttgaccaccgtgccgttggccagcggcgtgccgggcgtgaagctccagttgccgctgccgtcggcggtggtttcgccgatcgggttgccgttgccgtcggttaggatcaccttggccccggcctccgcggtgccgctgatggtcgtgccgttgctcggatcgatcaccggcgccggcggcgccaccgcgtccaccgtggtggcggcctgcgggccggtattgccggtcgggtcggtggccgtggcgacgatcaccgtgccgttggccagcggggtgcccggcgtgaagctccagttgccgctgccgtcggcggtgacctgccctatcgggttgccgccggcatcggtgagggtcaccgtggcaccggcctcggcggtgccgctgatgacgacgccgttgctcgggttgatcaccggcgccggcggcgcgctggaatcgacggtcaccgtcgccggcgggctgctgttaccggcggcgtcctgggccaccacgttgaccacagtaccgttggcgatcggcgtggacggggtgtaggtccagttgccgctgccgtcggcggtgacctcggcgatcggattgccgttgccgtcggtgaggatcaccgtgctgcccggttccgcagtgccgctgaggctgctgccattgctcaggttgacggtcggcgtggccggcgcgatggcgtccacggtagtgctgccctggccgccggtattgccggccgggtcggtagcggtggcgttgaccacggttccatccgccagcggcgtggacggggtgaagctccagttgccgctgccgtcggcggtgacctgcccgatcggattgccgctgccatcggtcagggtcacggtggcgcccggttcggcggtgccgctgatctccgcgccgttgctcggattgaccaccggcgcggccggcgccaccgagtccacggtggtgctggccggagcgctggtattgccggtcgggtcgctggccgtggcgttgaccacggtgccgttggccagcggcgtgcccggtgtgaagctccagttgccgctgccgtcggcggtgacctggccaatcgggttgccgttgccgtcggtcagggtcacggtagcgcccggctcggcggtgccgctgagcgtagtgccgttgctcgggttgaccaccggagccgccggggcctgcgagtccacggtgacgctggcgcccgggctgctattgccggcggcgtcctgggccaccacgttgaccacggtgccgttggcgatcggcgtggacggggtgtaggtccagttgccgctgccgtcggcggtgacctcggcgatcggattgccgttgccgtcggtgaggatcaccgtgctgcccggttccgcagtgccgctgaggctgctgccgttgctcaggttgacggtcggcgtggtcggcgccacgccatcgacggtggtgctgccctggccgctggtgttgcccgccggatcggtggccgtggcgttgaccacggttccatccgccagcggcgtggacggggtgaagctccagttgccgctgccgtcggcggtgacctgcccgatcggattgccgctgccatcggtcagggtcacggtggcgcccggttcggcggtgccgctgatctccgcgccgttgctcggattgaccaccggcgcggccggcgccaccgagtccacggtggtgctggccggagcgctggtattgccggtcgggtcgctggccgtggcgttgaccacggtgccgttagccagcggcgtgcccggcgtgaagctccagttgccgctgccgtcggcggtgacctggcctatcgggttgccgttgccgtcggtcagggtcacggtagcgcccggctcggcggtgccgctgagcgtggtgccgttgctcgggttgagcaccggcgccgccggggcttgcgagtccacggtgacgctggcgcccgggctgctattgccggcggcgtcctgggccaccacgttgaccacggtgccgttggcgatcggcgtggacggggtgtaggtccagttgccgctgccgtcggcggtgacctcggcgatcggattgccgttgccgtcggtgaggatcaccgtgctacccggttccgcagtgccgctgaggctgctgccgttgctcaggttgacggtcggcgtggtcggcgccacgccatcgacggtggtgctgccctggccgctggtgttgcccgccggatcggtggccgtggcgttgaccacggttccatccgccagcggcgtggacggggtgaagctccagttgccgctgccgtcggcggtgacctgcccgatcgggttgccgttgccatcggtcagagtcacgctgctgcccggctcggcggtgccgctgagcgtggtgccgttgctggggttgaccactggcgtggccggggctaccgagtccacggtgacactgctgcccgcactggtgttgccggaggcgtcggtggccgtggcgttgaccacggtgccgttgggcaacggcgtgcccggtgtgaagctccagttgccgctgccgtcggcggtgacctggccgatcgggttgccgctgccatcggtcagggtcacggtggcgcccggctcagcggtgccgctgagcgtgctgccgttgctcgggttgaccactggcgtggccggtgccacggcgtccacggtgacgctggccggcgaactggcgttgccggacgggtcggtagccgtggcgttgaccaccgtgccgttgggcaacggcgtgctcggggtgaaggtccagttgccgctgccgtcggcggtgacctggccaatcggattgccgttgccgtcggtcagggtcacggtagcgcccggctcggcggtgccgctgagggtcgtaccgttgctcggatcgacggtgggcgtggccggcgcgacggcatccacggtaacgctggccggcggactgctgttgccggcggcatccctggccaccacgttgaccacggtaccgtccggcagcggggtggacggcgtgaaagaccagttgccgttggcatcggcggtggtctggccgatcggattgccattgccgtcggtcagggtcacgctgctgcccggttcggcagtcccgctgagttcgctgccgttgctcggctcgaccaccggcgcgttcggcgccacgccgtcgacggtgatggaggtcgccgggctgctgttgccggcggcgtccctggccaccacattgaccacggtgccatccggcagttggctaccgggggtgaagctccagttgccgttggcatcggcgctggtctggccgatcggattgccgttgccgtcggtgatcacgatggtcacgcccgcttccgccgtaccgctgaggacgctgccgttgctggcattgacctggggcgcgtcggggaagtcgggagcttcggcggtgaccggggtgctgctgttgccggccgggtcggtaacgatcaccgtcaccgtctcgccattggtcagcggcgggttcagcgggacctcgaagctgccaccggggccgaccaccacggtggtgtccggctggccgtcgccatcggtgtcgacaccgacggtggcgcccggctctgcgttgccggtgacgctgctgccgtccggcgccacctgcacgtcggtggccggcgccggggctgtggtgtccggcgcctcgacggtcaccggggtgctgttgttgccggccgggtcggtaacgatcaccgtcaccgtctcgccattggtcagcggcgggttcagcggaacctcgaagctgccgccggggccgaccaccacggtggtgtccggctggccgtcgccatcggtatcgacgcccaccgtcgagccgggttcggccttgccgatgacgctgctgccgcctggcgtcacctgcacgtcggtagccggcgccggggcggtggtgtccggagcggtgacctgggccggcgggctggcgttgccagccgggtcggtgaccaccacggtgaccgtctggccattggtcagcggcgggttcagcggagcggtgaaattgccgttggcatcggcgatcacggtgaggtccggcttgccgtcgccattggtatcgatgccgacgctcgcgccggcctcggcctggccgctgatgctgctgccgtcaggcgctatcttcaggccgctggccgccttcggcggagtggtgtccgggggcaccgaagaaccgccgccgccaccgccgccgctgctgttggaaatcgccaccccggcgccgatggccgccgcaccgaccagcagcgcagtccctgcgctcatgccaccgagcacaccggcgccggtcagcgactcgaaaccggccaggctttcctgcgggatgtagccggccatcagcggcccgtcggcagcgaccggcggcagatctaccgccaccagcttgtccttgtcggccaggaacagttggctggaaggctggccttccgcatagaagttggcgatccggacgctttccccggtcttcagctggacgatcaggtccgaaccgctcttcgagtatcccgccaccgactccggtgcgacatcgagcgcgatattactgctctgggagagtttgagtatcccgttttccggaacctcgacggcagccgcagaagaaatactctgatcgataggggtaactttcgcctggatcgacatttccgacattcctcttgtcaagcagcgaccgaacggccgcaccatgtaatccagaaatagcagcttttaaataaaaggcgagtctgactttatatataacgactaagaaaacccccatgaaaaattcaatttagataacccctggaaaacatgcagccatttagccatcacacgcctatctaattgataaacaatatataatcaaaaagttataatactttataaacaacccccatcacctggcacggcaaatcgactaaataacccagcgggcaaatatcagaactctacgatgcgtatttcataaaaaaccgggagaaatgaaatagcacttcccggcacctcgtagttcgtcggcgcgaggcgacggcaagacgaccccgacagttccaacggaaagcatcgccgggcatcccgcgaagcggccttcatcgtcctgcaatcaaagcgtcatcgtcacgatgccaagttatccaaccgatcctctcccgcgagcgaccatgcatcacggtatctccccgccccaggacgccgacctgttcggcctgatctacggtttccgtttccgccccggcgaagcggggcgggaaatcgactcggctaccgccctcgcctgcctgcggcaggctcgcgaggaggcgccggacgagttcctctggctgcacctgaacctcgcccatgccgcctgcgagcgctggatgaagaagcatctggaactgccggattatttcttcgaaagcctgcgcgaggggtcgcgctcgacgcgcatcgaacacgtcgactcggcgctgctggcagtggtcaacgacgtggtcttcaacttcggcctggtctcttcggacgtcgccaccctgtgggtctgcgcccgtggccggctgctggtcagtgcacgagcgcaaccgctgcgctcggtggacaagctgcgctcttcggtgaagcacggcgaacctttccgttcgcccctgcagttgctgatccacctgttgcgcgaccagggcgacgtgctgacccagatcgtccgcgaaaccagcgtcgcagtggaccgcatcgaggaccagctactggccctgcgcctctccgccaaccgcgccgacctcggcgccatgcggcgcgtgctggtacgcctgcaacgcctgctggcgctggagcccggttcgctgctgcgcctgctcaaccgaccgccggaatggctacaggatgccgacctgcgtgagctgcgcgaagccaccgaggagttctccctggtgatcagcgacctgaccgccctgggcgaacggatcaagctgctgcaggaagagatcgcggccaagctcaacgaacagaacaaccgcatcctcttcaccctgaccatggtcacggtgctggccctgccgatcaacatcgtcgccggcttcttcggcatgaacgtcggcgggattcccttcgccgacgatcctgaaggcttctggatcatgctcgtgctggtcgccagcttcaccttcctcgccggccgctgggccttccgcaagcgcggcgactattgagcgtggacaacgccggcggacagtggttaggttgaccgaccaccgtcagccggaccttccatgagcctttcccccgccgatctcaagcaactccaggccgccaagaacctgctggagaaccctggactcaccgcgcaactcaccagcctgctgggcacgccgatcgaatacggcctgaagaagctgccacggaaggtcaacgagaagctcggttcggtgatcgagggagcgctgctgaaagtcgcccgctcggccaccgccactctccaggaaaacgccagcggtcaaccggcgaaccgcctgcataccctcggcgccgccgtttccggtggcgtcggcggcttcttcgggccgctggcgatgctggtcgaggtgccggtcaccaccggcatcatcttccgttccatcgccgacatcgcgcgcagcgagggcgagtcgatcagggacatggacaccctgatggcctgtatcgaagtcttcgccctcggcggcaaatccgcctcggacgacgcgtcggagtccggctactacgcggtgcgtacggcgctggcccagcaggtcaaggcggccgccgacttcctcggcaaggacgccggcagcaagaaggccgcgcccatgctcctggccctggtgcgcaaggtcgccgagcgcctgggcgtgcagtattcggaaaagcttgcggcgcagatcgtgcccatcgtcggcgccctcggcggcgcggcgatcaacacggtgttcatgaaccatttccaggccatggcgcgcggtcacttcgtcgtccgccgcctggaacgccactacggcaaggatgtggttcgcgacgcctacgccctgctgccccggcgcggctgagcatgccggcccacgcggtcagcctggcgccgggcgcggcggcagcgacgcgccagctgttcagcgccgtttcgctcgcggcggagcccggctggagccgggccccgcgccgactcagagcgccaggccggggttgtacaacggacggaaagcgcaatgggtggtgccggcgctctggttgtagaaatagtagcggcgacagtcgttgtcgtagttgctggtgccgacgttgatccggtacggaccgaagctggcgccctgcagggaaacgaaggcgccgttgtagagcagcgagaaatgcaggtgcggtccggtggagctgccaccctcgcagagcgcggtgttgatgttgccggcatagacgccgagcttggtgtcggcgctgacctgctggccgttgctcacctggatctggtccatatggtagtagttggtcgcccagccgctggggtgggtcacccgtacctggcagcgcgacagcacccgtaccgtaccggcgtgggcggcgaccacgctgtaggtcgcactgccccagcgcggccagtcgtaggacgcatcgaaggacgagtacggatagcccgagccggtgttcgaatgcgctccgttgggctgccaggaatagccctggcgccagggcaattgcatcaggttggatggcggcgccagcgcggccttcgcctggagttgccgggccacgcggttgcgcggctgcaggagttccgcggccggggtgccgaacaggcgctggaaggtctgcgcgtaggcgccgagcggattgccgccttgcacggcggaggccttcgccccctctcgcaacagaccgagcagcgcggccgatgccgcgttcaggccgtcctcgccgacggccttgcgcgcagccgcctggcgcaactggtattcctcgaaaccgtagtagcgccgcgacaactgctgcaacacgtcgcggacctgggcatcgaagccgcgtttcgccgacagccgtcccagcggcgccgccaaggcgcgctcgtccggcgcccccaacggcccggattgcatgaccatcagggtcagcaacactttcgggttgatgctgtagtagccgctccagtgctccaggtattcgctcttgtcgcgcagcgccggcgcattcaccgccaggtaggcctcgaggtcgaacgcctcggcgtcgcgaccgtagaggaacaggtcgtcattcagcggcagggccacgctgggcagttgcaactggccgagtaactccgccgaatagcggaaggccggcaggccatcgtcatgggcattggccgtaccgcccacggcgagcgccagcagggcgaagaggaacggcgagcgcgggctcgccagggcgcgggatcttttgtgctgcatgggtagctcctggtcatcgaagggaaaccttgaaagccagcagcccggcgacatcgcctccgacgggatagcctggtccgctccgccggtatttcgcccaggccgggttgcacgccgcaggaccgtgcaacgccgtcacccgggaagacaactatcagcttttgcagtagatccggtgccccgctccgtccggctgtaaagcgtgcggcagcgcactccaaccgagccgaatcgatcacagaacgccaggcgtcggaaatacttcgatacagtctgcgcgcgctcagcgttcctcggtggaggagccgtcgagcggatcgcgacgtgccagctcggcttcgtcgaggccgtggccagcgccgatctcgttgccatgcacgaccctcaggcgcttgtccgcgggcgattcgccaccgcgctcggccggcgagcgggcgccgctttcgtcgatcagggtctccggcgccagatcgtccatgccgacgttatcctggtaaccgtcgtcctcgtctggctgcccgccggcgtggcccgcctcgcgtacccgccgcggggaaaactcggcttccacctcggcctcgggccgctcgtcgccgatccgtgccttgcgcgcctggcggcgctcgtcgaaatcgagttcgcgtatcgaacccatgcggtcctgaatgtcgtcgatttcctggggtgtggttttccgtcgtgtagccatggcgacctccgttacgaatggcgggcgcgcaccgcgaatggcgcaacgcccctgtccggtcgaccggcgaggcgccggaagattcaggaaatccaaccgacggcggctgcctcgctaccgcggtggcgggcaaaaaaaagccggatcggcccggggcgggctggacgatccggcgtaatcgaagcgcgggacgtcgcgcaccttgccgccggcacgggcgggaggtggcgcacagcgtttcgcagggaatgaccacggcatcggccggtggtccagggggagtcaggtcggcacggcttcctcgagatagtcgatggcctggcgcacggtctcgatccgttccgcatcgtcatcggcgatctcgacgccgaactccgtttccagggccatgaccagttcaaccacctcgagcgactcggcaccgaagtcgttacggaagtcgctgtccagccggatgtcgcattcctccacgccgaaccgggcggctaccagtttcctcactctggtctcgatgtcgtccatgcattgcggtcccactgcccggccctggaaaaaagtgcggctactaaagcctccgtccccgccagcgacaactgccagatctggcagtggcgctgcgctggagcgcggccgccgcagcgcgccggacaatccggtggacggagcgcgacgcgaggattcgaagtccgtcacagggcgcttcccggcgtatgcgcaatcacccgcgccttccctcgcggcaggctttcgggcagttccgccagggcccggcgtgcctgctccgggtcgaggtagtcgccccgttccaccgcgaacagctcctggccatcgcgcagttcgcggcgcaaacgcaacgacagacccggatgccgctcgatcagcgcgcgcatgaaggcttcgctgctgccctcgaccaatcgcacggcgtagcgctggggtgacggcggctgcggcgcgtgcgtgccctggcgaacctccggtacctcgccgccgcgaccgtcgcccagggacgccgggtccgccaggcgcggcttctccatcagcaccggggctggagccggatagctgcgcggcgagccaataggtgccggtgcgccctgggcggcgggacgcaggtcgatggcgccggcatcctcgaacagcgggcgtaccggttcgccggcggcaccgcgcagcaactggatggaacggtaacggccatggctgatgcgctccaggccggcggcatcgcggacgatgctcggtcgcaggaagaccatcaggttgcgcttcacccgggtctcgcgggacgagcggaacagccggccgaagccggggatgtcgcccagcagcggtacccgcgaatcgctgcgcagcaggtcgtcctggatcagtccgccgaggacgatgacctggccgtcgtcggccagtacggtgctcttgatcgagcgcttgttggtcaccaggtccaccgccttcgccgccagggtggcggttggcgcgatggaggatatttcctgctcgatctccaggcgcagcatgcggtcctcgccgatgtgcggcgtgaccttgagggtcaccccgatatccttgcgctcgacagtggtgaacggattgctcgaaccgctggcgctggtggtgtagctgccggtctggaacggcacgttctggccgaccaggatttccgccttctggttgtccagggtcagcaggctcggcgtcgacagcaggttgctgcgactattgcggctcagcgcggtgaccagcgcgccgaaatcgcgactgccgaggccgactatcgcaccgtcgggcagctctgccggcggcttgccggcctgcaacgcgcccagcagggtgccgatggacaacccgctgtcggcgaagccagcgccgccggcgacatgcccgctacgcagcgcccattgcaccccgagggcgtcgccgatctcgccggacagctcgacgatcgccgcctccaccagcagttgcgcgcgcggcacgtcgagctggcggacgatgtcctcgagcaggccgacatcctccgggtcggcgaggatcaccagggcattcagcgattcgtcggcgcgcaccagcaggccgcgcttgccgcttccccggccatcctggccccgctcgccgtgcagcgattcgccgatctccccgagggtggcggcaagggtcttggcgtcgccatggcgcaggcggatcacccggctgttcgccgaccgcgacgaggggacgtcgagcgactgcgccagccgcagcaagcgcgctcgcgcctgcggcggaccgagcaggaccaggcggttgctgcggctgtcggcaaggacctggacggtggcggcgctcttcccggcggccggggtgacgctgcgatcgagcacctcggcgatttccgcgacccaggcatggcgcatgtcgtagatgctgtagtcatgttcgccggcccggtcgagactgcgcacgatcgcctcgatgcgctcgatgttggcgcggcggtcgctgacgatcagcgcgttggccgacggtacggcggccagatggccatgggccgggaccagcggccggatcatcgggatcagttccgccaccgaggtctgctgcgcctggaccacccgcgtctccaggctgcccggcccatcgcggacggtcttctgcgcggcgtcctggcgtgcctccatgttcggcacgatacgcgcctggtcgccctgcggcagcaccgcgtagccgtgggtggcgagcaccgaaaggaatagttggtagacctccgccaggctgagccgcgcctgggataccaccgtgacccgccccttcacccgcggatcgacgacgaaggtctggccgctgatgctcgatacctgctcgatgaagtcgccgatctcggcatccttcatgttgatcgtccactgctcttcctcttgcgcggcggcagtctcggcaggtgccggatggaccggcggcgccaggccgaggacggccagcgacaggaccaggaacagcggagacaggcgctgggcggaacgggtactacaacgtggcatgggtggtttctgccccttcggctttggggaaatacagacgttcttcataaccctggtcgcgcagcaccacatggtcgcgatgaaccgccagcagcacggtgccggggcgcacttcggcgcccggcaggaagcgctgcgagcgcccggccaccgcgatcagcgccgccgagcggtcctcgcgacgcgccaggaagcaggccagcaggcgcaattgcagacgctcgcccgccgtcgcgccgcgcggcgacggagcgccaccgaacaagccggctaacgccgcgcgcggggccgctgaagggttggctggcggcgccggggccgctgcggcgggcaattccgccagctcgcggcgcagcgagcgcgtctggctggccaggctggcgctgagcaacgccagcagcagcacgcaaagcacagcgggcgcatgcccggccaggctgcgcagggaaacgaaagacgatggaaggtgacgcgacatgcagcaggcggattccggcaaacgggcgcgctgcatcgacgcggctcgcccaggggcggcgagcataagggatggggctgcggcctacggccgcgaaagggcaaaactgttaaggctgcccgctttgatccttcgtggcgggaactggcccacaaaacgccaggcgcgggaaaggcctcagcgcttgcccatcgaacgacgggtaccgcgcggcgccatgccgggacgctggcccttgtcgtggatcttccgctgcggatagagctgggcctggttcttcttcgccagggcggccttcagcaacgcgctggcgtcgctcggcgcggcctgggccggagcgtcgtcggaggaaagggcctggggaagagcgtcgggagcggaagccatggcgtatccggatcgggggaaatcgtggggacgcgattatacatggctgcccggctgtccggcagcacctgccggcgtatcgccgccggtcaacgcagttgccaccagcccggtagcaaccggcgcaccttggcctgggcgaaacggtcgtcgatcaggtgcaccacgccgcgatcgctgcggctgcggatcaccctcccggcggcctggaccaccttctgcagtcccggatacaggtaggtgtagtcgtagccgtcaccgaacaggcgctgcatgcgcaggcggatctgctcgttcaccggattcacctggggcaacccgagggtggcgatgaaggcgccgatcaggcgctcgccaggcaggtcgatgccttcgccgaaggcaccgccgagcacggcgaagccgatgccctcgccgcccgcgacgaagcgctcgaggaagacccggcgctccgcctcgtccatccgtggcgtctggctccagcacggcacccacgggtatgcctggcggaagacgtccagcgcctgctgcaagtaatcgaagctgctgaagaaggccaggtagttgcccggccgctggcgaaactgctcgccgagaatcgctgcgatgggcgccagggatgcctggcgctgcgcatagcgcgtggaaacccgacgctgtatgtgcacctccagttgctcggcgctgaatggcgagtccacttccagccagggcgtgcccgccggcaggccgagcaggtcggcgtaatagtcgcgcggcccgagggtagcggagaacagcacggtggagcggctggcggcgaagcgctcggcgagaaacgccgccggcaccacgttgcgcaggcacagccgggccaggctgcggccgttgcggcctgggcgcttctcgatgtcgaacagcgaatgctcgccgaacagctcggcgagacggccgaactgcaggatcgcgaagtagaactcctgcaacgccggctccagcgcctgcggttgctcggcgagcaggtcgttgatcgccgccaccgcgttctgcaaggccaggagcagcttctgcggaggctcgtcgtaggcctggtagtcgtccgcctgggtcttggccagttcgttccaggcacgctggatgcgctccagcggtttcctcagggcctccggggcggttttgcgcacaccgaggaaatcgccctggtcgagttcggcggaatacatccgccggccgcgctccaccaggttgtgcgcctcgtccaccagtaccgccacccgccactggttgacctgggccaggccatggagcatggcgccgagatcgaagtagtagttgtagtcgcccaccgccaggtcgcaccagcgcgccagttcctggcccaggtagtagggacagacccggtgcgccagcgccacctcgcgcaaccgcgcctggtccagccagcgcgcctccacggcggcggcgcgggccgccggcaggcgttcgtagaagccctgggccaggggacaggactcgccgtggcaggccttgtccgggtgctcgcaggccttgtcccgcgccaccagttccagcacccgcaccggcagtccgccggtctccccttccaggctacgcagggcatgcagcgcgagggcccggcccggggtcttggcggccaggaagaacagccggtccaggcgctgcccgggcatcgccttgagttgcgggaacagcgtgccgatggtcttgccgatcccggtcggcgcctgggccatcaggcaacaaccggcggaggcggccttgtacaccgcctccgccagttgccgctggccgtggcggaattcggcgtggggaaagcgtaacgcggccagttcgcggtcgcgccgctggcggtgcgccagttcctgctcggcccaggcgagaaacgcctggcactggctctcgaagaacagccgcagctcgtcggcccgcacccgctctacgaagcgggtctccttctggctgccgacctccaggtagaccagcgccagttcgacttcctccagcttccgttcggcgcagagcagccagccgtagaccctggcctgggcccagtgcaggtgccggtggttggccggttgcagggcgaggtcgccgcggtgggtcttgatttcctccaggcagttcgcctgcggatcgtagccatccgcccggccgcgcacctgcaagtgacggtagcgtccgtccagcgccacttcgcgctggtagtgagcggggcgccgggaggtcaccagggtatgtccggcgatgccttccagggcgctgggcgacggggtgaagcgcaggtcgaggtcgccgcgcttggcgctgaactcgcaaagcgcgcgcaccgccacctggtacagcgcctcgccgccctgctcagtcatcgacatgccagcgcacgtagcagaccgccaccggcatctcccgctcgcggcagaattgcagccagcgcaactggttgtcctgcaggcggtcgcccggtcccttgacctcgaccatccggtagcgccgctgcgccggccagaactggatcaggtccggcaggccggcgcggttgcccgggatatcctccagcaggcgttcgaaccaggcgcgcaggtgggccgccggtaggcaatcgagcgcctgttcgagcagttcctcgccaagcagttcccagtagacgaagggcgactgcaggccgaacttgtcgcggtagcgacagcggatcgcgtcgcggtagctgccgtcctccagccgtcccaggcaggcctcgaacagggcggcgcggcgctggcggaagtcggcgctgtgcaggtccgccggcgcgctgtggaagggatggaagaacgccccgggaatggcggcgaagatcgcctcccagcagagcagtccgaacagcgaattgatcaggccgttctcgacgtagtgcaccgcgcaatcgggctcttccaggtgctcgcggaccgcccactcgacgctacagggttcgctcgggtacgccaggcacaggtccaggcggtcgatttccggagccgccgcccgcgcctgccgcggcaggccgagcttgccttgcaggcgcggcagcaatcgggccaggccctggcgttcggcgtcgctttccggcgcacagctggcctcccgcgccaatgcatgggcttcggcgaagcgctcgccgcgttccaggctgcgaatcgcccgcaggcgcgcgccggggtggctggattggcgatagagccgctgggccaggtcgaaatcccgctgcttttcgcagtgctgggcgaactggaacagcagcttgacccgccgcccttccagccagggattggcgtagggttcgcccggcaggccggcgagcagttcctccagcggctcgccgaggtcgaagcgctgtcggcagtcgaacaggtggagataggcgtcgacgtcggcgcgcaggcgaaagccgcgggaatcggcggaaaactcgacgctttcgtaacgatagatacccaggtcggcaaggacgaactccgaccagtcctgccacaggttgccgaaatacatcaaccgcaagcggtcgcagagcgccatgcagcgcaactcgtagaccggttcggcgaagtcggcctgccactcggcgagccgccgcgcctcggggaacaacggctggagccgttccagcagcgcatccttgcgcaggttcgcgcgcccgagatggtccctgaacagctgcgacaattcgtccttcttcagcaagccgaacagttgcgccagttccagggtcggctgcgcgtccacccagcccaatgccaacagcggttgcacggcggcgcgcgtgtcgccgatctcggcataggccagcttgccttcgcggaacagcgtgcccttgcgcatcaccatgcgcaccagcagggcctggctggcctcgggcagctcggcgaacgcggcgatgaaggcacgttcctgatcgtcgagcagatcggcatagcgttcgccgatccaggcgagcaccgcgcggaagttgtgcaggtagtagaagggttcgggaagcgctggggaattcacgggaagcggagcctggtactgttcatgcatacagataccagcgcccccacggcttggcaatgcgcatccgatcaagcgtcgccggcctgacgacgactatccaggcacaaggcgttcgttatataaaaatattaacaacgaaacctgccccgtatcggtcccgatgaagaagatccgccaacgcaacctgcaactgatcctcgacgccgcctgcgaagtcttcgccgactgcggcttcagcgccgcccggctcagcgacgtcgccgagcgcgccggcgtggcgaaggccaacgtgctctattactaccgctccaaggcgcaactctacgaggcggtgctggacagcatcgtcgagcccctgctggaagcctcccggccattcgccggcgaccagccgcccgccgaggcgctacgcgcctacgtcgacaacaagatgcgcatcggcgccgagcggccgcacgcggccagggtcttctcctgcgagatcatgcgcggcgcgccgcgcatgccggcgccgctgctggaacgcctcgacgcccaggcggaacgcaacgccgagcgcatccgccagtggatcgacgaaggcctgctggcgccgctggatccgtaccacctgctgctcaacctgtgggcgatgaccgagtcctatgcccttggcggctggcaactggcgcgcctcaccggccaggccgggctggacgcgagcgactaccggcaggcggcggaaaacatcgtccgcctggtctgcgccggctgcctggcactccccggcgaggccgcgccgcgtcggcgtttccgcgcgctggccggctgagcgacttgcgccggatcaatttccgcgtagcgctatattccaaaagccatagcgaacccctaagcttgcgccagccccgtccgccaacttcgttcgccccccacaggagcactccatgaccacccgcctgccccagctattgctcgccctcctcgccagcgccgtatccctggccgccagcgccgacgaggtgcaggtcgccgtcgcggccaacttcaccgcgccgatccaggccatcgccaaggaattcgagaaagacaccgggcacaggctggtcgccgcctacggcgccaccggccagttctatacgcagatcaagaacggcgcgccgttccaggtgttcctctccgccgacgacagcactccggcgaaactggagcaggaaggcgaggtcgtgcccggctcgcgcttcacctatgccatcggcaccctggcactctggtcgcccaaggccggctatgtcgacgccgagggcgaggtgctgaagagcggcagcttcaggcacctgtccatcgccaacccgaagaccgcgccctacggcctcgccgccacccaggcgatggacaagctcggcctcgccgccacgctcgggccgaagctggtggaaggccagaacatcagccaggcctaccagttcgtttccagcggcaacgccgaactgggcttcgtcgctctgtcgcagatctacaaggatggtaaagtcgcaaccggctcggcctggatcgttcccaccgagctgcacgacccgatccgccaggacgcggtcatcctcaacaagggcaaggacaacgccgccgccaaggccctggtcgactacctgaagggcgccaaggccgtcgcgctgatcaagtcctacggctacgaactctaaggcgggacctgcatggcgttgccactcgacagtacggacctggcggccatctggctgaccatcgagctggcttcgctcaccaccctcctcctgctgctgatcggcacgcccatcgcctggtggctggcgcgcacccgctcctggctgaaggggccgatcggcgcggtggtggccctgccgctggtgctgccgccgacggtgatcggcttctacctgctggtcagcatgggtcccaacggtttcatcggccagctcacccagagcctcggtctcggcaccctgcccttcaccttcgccggtctggtggtcggttcggtgttctactcgctgcccttcgtcgtgcaaccgttgcagaacgccttcgaggcgatcggcgagaaaccgctggaggctgccgcgaccctgcgcgcgagccccgtcgaccgtttcttcagcgtggtcctgccgctggcccggccgggtttcgtcaccgccgcgatcctcggcttcgcccataccgtcggcgagttcggcgtggtgctgatgatcggcggcaacatcccggagaaaacccgcgtggtctcggtgcagatattcgatcacgtcgaagccatggaatacgcccaggcccactggctggccggcggcatggtggcgttctccttcgtcgtcctcctcgccctctattcgggccggcgccgccggccgggctgggcctgagatggacggcctgcgcctgcgcttccgccgcgcctaccccggcttcgaactggacatcgacctggctcttcccggtcgtggcgtgaccgctctgttcggccattcaggctccggcaagagcacttgcctgcgctgtatcgccggcctggaaaaggccgccgagggcgaggtgacgatcaacggcgagacctggcaggacagccgccgcaacctcttcgtcgcgccccaccggcgtgccctgggctacgtgttccaggatgccaacctgttccgccacctgacggtgcggcgcaacctggccttcggtctcaagcgcatcgccgccgccgaacgccgcgtcgagctggaacaggcctgcgccctgctgggcatcgagcacctgctggaacgcatgccggaacgcctctccggcggcgagcagcaacgcgtcggcatcgcccgggccctcctcaccagcccgcgcctgctgctgatggacgagcctctggcatccctcgacctgaagcgcaagggcgagatcctgccctatctcgagcgcctccacgaggaactggacatcccggtgctctatgtcagccactcgccagacgaagtggcgcgcctggccgatcacctggtgctgctggagaacggcaaggtccgcgccagcgggccgatcggcgaaaccctggcgcgagtcgacctgccgctggcgctggacgacgacgccggggtggtgatcgagggcacggtcagcgaccacgacccggcctacggcctgctgaccctggtcctgcccggcagcgcgctgcaaatgcgcgtcgcccacgccccgctggcccccggcaagcgcctgcgcttcaaggtacaggcgcgcgacgtcagcctgaacctgcgcgacgacgcccagagcagcatcctcaaccgcctgccggtacgggtcctggaattggtcgataccgacaccgcggcccacgtcctggtgcgcctggatgccggcggcaatccgctgctggcgcggatcacccgttactcgcgggaccagttgcaactacgacccggccagctgttgtgggcgcagatcaagtcggtggcggtgctcgcctgaccccggcctcgcctgcggcgcctagaccctgggccaacggtagcggatcagccgccccatccgccgcaggaaggcgaagccgttgtagatcggcagcatcagccgcgacgactgcggcagcttggcaacgtcctgcgggtcatagtcggtgacctcctcgatgaagcgcagggccggatgccaccgctcgagttcgcgcgggtcgtcgatgctccaatgcacctgcgccccggtctcgcgcagcggcggatacaggcgcagcagcatgatgccgaggcggccgtagccgtcgaacagcagctcgccgctacccaggtggtcgaccaggcgttccaccaggcgtcgcacctgggactcccgcagatagggcatcagcccctcggccaggaccagggcgggccgctcgcgcggcaccccttgcagccagccgtcgtcgtccaccgagtggcgcagcgcccgataggcgccggcgcgcggcgggtagagtcgctcgcgcaggtccatgacttccggatagtcaaggtcgaaccagggcagctcggccggcggatcgacccggtagatacggctgtccaggccgcaaccgaggttgagcacctgcccctcgggatggcggccgaggaagtcgcggcaggcctggtcgaagtaatgcgagcgcatggccagggcccgttcgttgcccttgccgagggcgaccctggagaagtcgaagtcgatctgccgcaccgcctcctcggcgaaacggtcatggaggatggaatcgtccaggcggctatccagcgccttggcgtagagggtgatcaggagcgtctgcttttctccggtgagggtaatgcggtggccgggcatgaaaacctcctgcgggcacgcgtgcctcttcagtccttgccgaaaacatcgctatgcttcggcaatgattgccctggagtcacgaatgaaagccaactccgatgaactgcaaagcttcgtcagtgtagtcgacagcggttccatcagcgccgccgcggaacagatgggactgaccgcctcggccgtcagccggaccctctcgcgcctcgagcacaagctcggcaccaccctgctcaaccgcaccacccggcgcatggagctgaccgaggaaggccgctacttcctcgaccaggcacggcagatcctgcagcagatggaggcgctcgaggaacgcctggccctgcgccggcagagccccgccgggcgcctgcggatcaacgccgcctcgcccttcatgctgcacgcggtggtgccgcacatcggcgagttccgccggctgtacccggacatccagctcgaactcaacaccaacgacctgatcatcgacctgttggagcaacgcaccgacgtggcgatccgcatcggcgcgctcagcgactccaccctgcacgcgcggccgctgggcgccagccgcctgcacatcctcgccagcccggagtacctggcccgccacggcacgccggcgagcatcgaggggctgcgagggcacaccctgctcggcttcacccagcccgagcatctcaaccgctggccggtggtgcacgccgacggcgatcgcctggagatccagccggatatctctgcctccagcggcgagacgctccgccaactggccctgagccaccagggcatcgcctgcctggccagcttcatgaccgaccgcgatatccaggatgggcgcctggtgccgctgttcgccgaacagatgagcgaataccggcaaccgatccacgccgtctactatcgcaactcgcaactggcgctgcgcatccagtgcttcctcgacttcatccagcagcgcctgggcgcctgagaccgaccgtgaacgaatccctcgatttctcgccctacctcgagcgctgggcgttgcaacccgacggcgagcccttcgccacccacagcagccgcctgctgccggtgcgccatcgcggcgcagcggcggtgctgaagatatccagtgccgaagaagagcgtttcggccacgtactgctcaactggtgggacggccagggcgcggccagggtgctggcctacgaccaccaggcgctgctgatggagcgtgccaccggcgggcgctcgctgctggagatggtcaggcgcggcgacgacggcgaggctacgcgtatcctctgccaggccatcgaacgcatccatgccccgcgcccgggtccgttgccagagctgaccccgctggagcgctggttcgactcgctgtatgccgccgagcgccgctacggcgggctctacgtcgactgcgcgaatgccgcccgctacctgctgaagaccgctcgcgaacagcgcccgctgcatggcgacatccaccacggcaatgtgctcgacttcggcgagcgcggctggcaagtcatcgaccccaagcggctctacggcgagcgcggctacgactacgccaacctgttcaccaatcccgacgcgaagaccgcccaggcgcccggccgtttcgagcgccagctggagatcgtaatcgccgccagcggcctgcagcgccgccgcctgctgcaatggatcctggcctggaccggactctcggcggcctggttcgacgaggacggcagccgcgaggagaccgaagccgagctggccatcgcccgcctggccctggcaaacctcgctcgaacgcctgcgcaatgaactgtgcggcggctcccgcgctccaacgcgaggcactgttccgccgccgcgatccggtgtcaaatacacaccccgccaagatggcggtgcccaccacccagtaaggaaacccaagatggccggagccagcctcctcaccctcctcgacgatattgccgcggtgctcgacgacgtctcgctgatgaccaaggtcgccgcgaagaagaccgccggtgtcctcggcgacgacctggccctcaacgcccagcaggtcaccggggtcaacgccgaccgcgaactgccggtggtctgggcggtagccaagggctcgctgcggaacaaggcgatcctcgtccccaccgcgctgttgatcagcgccttcgcgccctgggcggtgatcccgctgctgatgctcggtggcgcctacctgtgcttcgaaggcttcgagaagatcgcccacaaatacctgccccatgacgacgagcacgccgacgaggcagcgctggcggccaatgtcgacgtggccgccctggaaaagcagaagatcggcggcgcgatccgtaccgacttcatcctctccgcggaaatcatcgccatcaccctgggtaccgtcgccgagtccagcttcaccacccaggtactggtgctggtcggcatcgccctggtgatgaccatcggcgtctacggcctggtcgccggcatcgtcaagctggacgacgccggcctctacctgtccaggcgcgacagcggctttgcccaagggctcggcggcgccatcctgcgcaccgcgccatacctgatgaaaggcctgtcggtggtcggcatggcggcgatgttcatggtcggcggcggcatcctcacccacggtatcccggtggtccaccacgccatcgaacaggccgcgcagagcgtcgccggcatcgccacgctgggcccgctgctggcggcgatcaccccgaccctgctgaacttcctgttcggcatcgtcgccggcgcggtggtcctggcgggggtgctgctggtcaagcgcctgctgccgaagaagaaaaagactggctgagcctgccatcgccgacagcgccatcgcggaaggcggatagccgccctggcgcacatcccacgaagcggttgtgcgccctgccccggaagtcctcctccgtttcaattcaataattttgcactgtaatagcaacattattcgttggagacgaataaagctcccctcctagaatggccaccagtgccatgagccgtctgttccgagccttccagacgaagatccgacctccgcactccatcgacccggcaacgggatacccagaagaataccgataacccaacgaggacccgagggtcgcgcctgctcgccagccggccggaccccggggcccggcgtgccagcgaccatgaacgatacggatagcagaaaagatccggacggctacaactacgacgtcgtccgccagttcaccctgatgaccctggtctggggcatcctcggcatgggcctgggggtgttcatcgccgcccaactggtctggccggcgctcaacctcgacctgccctggaccagcttcggccgcatccgcccgatccacaccagcctggtgatcttcgccttcggcggcagcgcgttgttcgccacctccttctacgtggtgcagcgcaccagcggcgtgcggctgatctccgatgccctggcgcgcttcgtgttctggggctggcaggcggcgatcgtggggatgatcgtcagctacccgctgggctataccacctccaaggaatacgccgagatggaatggccgctggcgctgtggatggcgatcgtctgggtggtctatgcctacctgttcttcggcaccatcgcccgtcgcaaggtgaagcacatctacgtcggcaactggttctacggcgccttcatcatcgtcaccgcgatggtccatatggtgaatcacgcattgctgccggtgagcctgggcaagtcctactcggcctattccggcgccaccgacgcgatgatccagtggtggtacgggcacagcgtggtcggcttcatcctctcggtcggcttcctcggcatgatgtactacttcgtgcccaagcaggccgggcgaccgatctactcctatcgcctgtccatcgtgcatttctgggcgatcatctcgatctacatctgggccggcccgcaccacctgcactacaccgcgctaccggactgggcgcagtcgctcggcatggtgatgtcgctgatcctcctggcaccgagctggggcggcatgatcaacggcatgatgaccctctccggggcctggcataagttgcgcgacgacccgatcctgcgcttcctggtggtgtccctggcgttctacggcatgtccaccttcgaaggcccgatgatggcgatcaagacggtcaactcgctgtcccactacaccgactggaccatcggccatgtccacgccggcgccctcggctgggtggcgatgatctccatcggcacgctctaccacatgatcccgaaactctggggccgcgagcggatgcacagcgtcggcctgatcaacgcgcacttctggctggccaccatcggcaccgtgctgtacatcgcctcgatgtgggtcaacggcatcacccagggcctgatgtggcgggcgatcaacgaggacggcacgctcacctactcgttcgtcgaggcgctggtggccagccatccgggctacgtggtgcgcctgctcggcggcgccaccttcgccagcggcatgctgctgatggcctacaacacctggcggaccctgcgcagcgcgcaggagcagcggcagccggtcctggcggccggccagggggcctgaacatgctgttgtccctgctgtgcctccccaccctggtgctcggcatcgcgctcagcctcgccggcagtacccgcgaggaacgcgagcaggccgccctgctgccgttcgccgacgatcccgaggccgcccgccgggtcgcccgggataccggcaagatctgccggcaggtggtccgccccctcgaggaatcccgcgaggccgccggcccgccgttcctcgcctgaaccgactccatcatccagggatggatgcctccagcacgaaagtgccttacggggccggcaacggcccctttctttcgcttcgaagagttccatgaacgactcccccagcaccgccgtacgcacctggctgaaaggcttccgccccctgaccctgaacgctcgaccgcgcgactgcctgcgcgccggactcggtgcctgcatcggcgcgctcgccgcggtattcgcctgccaggcgttgttcggcagcgaactggcgctgcgcctggcagcgccgctcggcgcatccgccgtactactgttcgccctcgcctccagccccctggcgcaaccctggtcgatgctcggcggcaacctggtcgccgccctggccggcggcctcagcgcctactggttcggacacgatctggccccggccctggtcggcatggccctcggcatgctgctgatgttcgccctgcgctgcctgcatccgccgagctgcgcgctggccctgagcgtggccctcaacccgtccctgagcgaactcggcatcgacgtggtctggccgatcctgctctccaccctggtgctgatcggctgcgcgctgctctacaacaacctgatgcgctctccctacccgcgcccctaccagtcgccgcgggccaatctccatggcacccgcgacctggcgccgagcgcgcgtacggacttctccgcccgggacctggaccaggcgctgcaggacttcggcgaatacgtcgacatcacccgcgacgacctcgagcgactgatccaccataccgagcgctacgccttgcgccggcgcatgggcgagctgaccgcggcacggatcatgtcccgcgacgtgcagaccgccagcaccgagaccttcatcgacgacgcctggaagcagttgcaggaacaccgtctgaaggccctgccggtgctcgacgagcatcggcggctggccggcatcgtcacccagagcgacctgctcaagcacttccgccccgacggcagcccgttcaagcgcctgcgcttcctgcgcgggaccaagctgaagacgatcatgaccaccccggtggtctgcgtacaggccgacacccacgccgtcgaactggtctcgctgctatccgacgaaggcctgcactgcctgccggtgctcaacgaggccggctacctggtcggcatcgtcagccagaccgacctgatcgccgcgctctaccgcaactggctgcagcacctgggccaggccgatcagatcacgtagtcccagcgctgcgaccagtcgctgtcctcgcggaccacttcgcgcagcaactggaacgcatggcgcagggtcggcgacaggcgctcgcgggagtacaccaggtaggtcgggtaggcgaactccggcgcctgctcgacccgttgcagggtgccgccatccaggtagctgctcaccacccgggtacggaaataaccgctgccgccgttctgcatgatgtactgcagggccagcggaccgaggttgcaggctagcgcggccttggcccggtccggcagcgcggcatcgtgctggctgcggaaatccgggccccagtcgacatacagataaggctccgcggatagcacggaacgcaccatcaccagcttttcctccagcaactgctcgacctgcagccccggccagtattccggccagtattccggctggtagaccagcgcggcgtccagcgcgccctgctccagttgcttgagcaggtcggcaccctggccgatctcgacccgcacggcgtggccgggaatcgcctcgcgcaggcgccgcatccagttcagcagcagcggattgcacaggctgacctcgccgccgaggttgagcaggttgcggaagccgtccggcagcggcaggtcgcgtcgcgccgcatcccaggtctgcaccagttggctggcgtagccgaggaagtgctcgccgtcggcggtcaggcgcgcgcccgcgcggttgcgcacgaacagccggcagccgagttgcccttcgaggttctggatgcgcgcggtgacggcggtctgggtcaggtgcaggcgttccgcggcagcgacgaagctaccgctgcgggcgatctccaggaaggtacgggcgaggtcgatatccatgcgaagcggtccgctgccacaggtgggccgccattctaggctgtgcaggcgcgggcggcgagcgcaaggcggcctggccgccctcctggagttctgcgacaaaacaccgcgcctagccgcttcggcacgctaaaacccttcgaaaaagcgacaacctgttgcacaaacgcgccacgccgtgactttttcgctttcgaaagcatcagttagcgtgaccgaacacggtggagccgggaagcgccacccatgttccacacagacatgaacgagagagaccgactcccatgaacgctacgctccgtttcaacgaggctttgctgatcaccgggcgcgccttccagccataccagtgcgttgcctggtccgagctaggcagtgacggcggcctgagcctgtccgtagtcgatcgcactggcacccgcctgctgggccgtgcacgcattccgagctccgcctactccgatccggagcagcttgccggcctgctgcaacaggcacgcgaagaactcagccacaacggctacaacctgcaggactggagtatgcccagccaaggctgagccgttccatacgacgaaaggcgcccacgggcgccttttttcgtttcctctattcgaggcggtcgtgctgccggaacgccacgcgcaccgcgttgcgccctgcatccttggcctcgtagagcgcgcggtcggcctcgcgatagagcgcgtccaggcccatgccggaggtcgaataggccacccccaggctgatggtcaggcaggggccggcgctggagcccaggtgctcgatgcccagcgcctccaccgcctgccgcaggcgctcggcgatggccagggtgttgccctcctcgctgtcgtagagcaacacggcgaactcctccccgcccaggcgcgcggcgatatccagcggccgccgcgcgccctgccggagcacgacgccaagctggcgcagggcggcatcgccggccggatgcccgtagtggtcgttgtaggccttgaagtcgtcgacatccaccaggatcagcgccactcccttttcttcgcgggcgccctgctccagggcccgctgggcgagcagctcgtagtagcgtcggttgaccaggccggtgaggctgtcctgttcggccatcatgcccagcagccgccggccgaggaactgctcgcgctgggcgtagtcctgcaggtacagggcgaacgaacagatcagcaccaccaggccgttgtagagcgtattcagcaggttggtacgcaggttctcttcgccgccgaaaagcaggaataccgccaggttcagggccaggcacagcaacgccaggcgcacgcaggcccagaacgccaggccgagcgggaagaacaccgcgaggatacccagggtcgcgcccagttgggtgaagcgcggcaccccatgccactcgaacagcacgtcgcaggccagcaccgccaggttgatcagcagcaggcagtagggcgcgatggcatcgccgaccttgcgcaggctgggcaggaaggccgccggccagaccaccagcagcaggccgatcattcccaggcgcacgcccagcagttgctcgaacaggctggggtgcaggcggatgtccaccatcatccagtcggccacgatgaacagcgcccagatcaggaacgccaccccgatggcagcgcgccgctgcatcagcgagttccagctgagaaactcgcgaaactcgttttccagctccttttcgaaccgcaaccaacgaaagccgttgcgcaactggcgcgcatacggattatccggcagaccagcctgtaccaggctgtcgcgtgcaagcatgctgactcccctacctcggaccgaacgctgaaacaggcctggacgacaataccctggcgcctctgcagcgatgagtcaaaaagccatcacccgttaccagacaatagggcatgcggcgtgccgaggcgataccaaccatcggcgcagcgggacgccccggcgagcgaatggcaagatccgtgggccgactggcattgcggccaggcccgaaggacgccagactgccgccatcgccatgaggttgtgccatgcccgaaccgcgcctgattgcctgcctgatctatcccgacgtgatgagcctggacgtgaccggaccgctgcaggtattcgcctcggccaacgtcgaacgccagcgccagggcctgccgcctttctaccggatacaggtgctcggcgagcgtagcgaagcggtgcccagttccgcgggcatccgcatctgcgccgacctcgcctggcgcgactgtccgccggaaagcctggacaccctgttggtgcccggcggcctcggtgtcgaggcgcagacccgcaacgccgacctgctcgcctggctgaaagccgccgaaccgtgcatacggcggctcggctcggtgtgttcgggagcgctgatcctggccgccgccggggttctcgacgggcgcccggcgaccacccactgggccgacgtggcgacgctgcgccaggggtttcccggcgtccatgtgcaaggcgaccgcctgcatacctacgacccgcggtgccgcgacggcgacgcccacatcttcacctcggccggcgtcacggcgggaatcgacctggccctggcgctggtcgaggccgacctcggccgcagcctggcgctcagcgtcgcgcgacgcctggtgatgttcctcaagcgtcctggcggccaggcccagttcagcgcctggctgaccccggaaccgagccgcaccccgcgcctggccgcgctgctggagtggattcccgccaacctcgccggcgacctgtccctggaagccctcgccgaccaggcctgcatgagcccgcgtacgctgtcccgggtatttctccaggaactgggcgtggcgcccggtcgctacgtcgagcgggttcgcctggaggccgcgcgcgccctgctgcaggacgcccaggcgtcgatcgccacggtgtcccggctgtgcggcttcggccatccggaaaacctccggcggacgttccacaagcatctttcggtcagcccccaggaatacgccgaacgcttcggcatgctggcctgacgctcccaccgaggaccttcccatgctggaactgcgccccaactgcgagtgctgcgaccgcgacctgcccggcgacagcggcgacgcgctgatctgcaccttcgagtgcaccttctgccgcgattgcgcgacgacccgcctgggcggccagtgcccgaactgcggcggcgaactgctggcccggccaaggcgtccgcgggatgcgctggtccgtcagcctgcctccagccgacgcgtcgtcaggcccggcggttgtccggagtgacgccatgctgctacgcaacccgaccctgctcctgctgttctgcggccaggccctgtactggtcctgctcgctgatcggcataaccctgaccgccctggtcggcgtccagctggcgccgttgaacagcctggctaccctgcccctggccctgctggtgctgggcaacctgctggcggtgcagccgttgtcgcacttcatgcagcgccacggccgacgtcccgggctgatgctcggcgccggcggcggcgtgctcggcggcctggtctgcgccgccggtgtctggactggcgatttcctctggttctgtctcggcgcgctgggcatcggggtctaccaggcctcggccatgtactaccggttcgccgcgctggaggcggtggatgccgggcggaaaggccgcgccagcgcctacgtgctcgccggcggagtactcgccgcgctgctggcgccgagcctggcgctgtggtcgcgcaacgcgctggcccagcccttcgtcggcgcctatctgctgatcgccgtgctggccctcgccggcctgctgctgatggccctgctccgcgaaggccaggcgccacgcccggcacgactcgcctggcgcgacataggcggcctgttgcggcggccggtggtccgcgcggccatcgcctgcaccgcggccggacacgggttgatgatcctgatcatgaacgctacgccgctggccatgagcttctgcggcctgccgctggaacagtcgagtcgggtcatccagtggcacgtgctgggaatgttccttccggcgttcttcgccggaccgctggtcgaccgcatcggcaaccgtcgcgtcgccctgctcggcgcgttcctgctcgccgcaagtgccggcatcgccctggacgggcagtcggtcacgcatttcctgctcagttcgctggccctgggcagcggctggaacctgatgctcatcgccggcaccaccctgctcggcgagggccacgccgaaagcgagcgcggcgccgcgcaaggattgatggagcaaggcaacagcctggtggcggcgctgatgtcgttcggctccggcgccctgatcaccagccttggctggaacgcggtgaacctgctggtctggccggcgctgctggtggcgctggcactgctctggccggtacgacgaacgcggacgctgtcgcgctgaaacgccggcaacgaaaaaggcgaccttgcggtcgcctcttctgctttacggaaacgcctcagtagtaggcgttctccttgttgctgtggtcggtcacgtcacgcacgcccttcagttcgggaatacgctcgatcagggtcttctcgacgccatccttgagggtcatgtcgaccatcccgcagccctggcaaccgccgccgaaacgcaacacggcgatgttgtcctcgaccacgtcgaccaggctcacctgtccgccgtggctggccagcccgggattgatctcggtctgcaggtagtagttgatgcgttcggtgatcgggctgtcctcgttgaccatcggcaccttggcgttcggcgccttgatggtcagctggccgcccatgcggtcggtggcgtagtccaccaccgcatcttcgaggaagggctcgctgaccgcatcgatccaggcagtgaagtccttcagggcgatggcggtgtcctcgaccttttcctcgcccggcttgcagtaggcgatgcaggtttccgcgtactgggtacccggctgggtgatgaagatacgaatgccgatacccggggtgctctgcttctccagcaactcggccagatacgcttgggcagcttcggtaatggtgatggcgctcatggcaactcctcgcaaatatgccgacagtttacgccaatcggtacttgcggataaagccctagtaaattagtaggaataattcgcgataaccgacccgccccttgtggagcgggtcgcgagactcagaggttctcgtagcggttcatgtccagtgcgcccgcctcgaccggctcggtttcgcggatgtacgcctcgagatcgtggaagtagctccagaactgcggattgctgcggcgcacgccccagcgttcgaccaccttgtcgaagtcctcgccgctcttcgccgcctccagggcgccgacgaaggcctcggcatccgtcgccggcagatcgaacatgaagttcgggtagctggacagcacgcccgggtagatcgtcagggtgtccaggcccggctggtagcgcagcgactcgccgagcatgaaggcgacattgctgtgcgcgcggttgcgcagcacggtatagacctcgcgcttgccgctggacgtacgtatccgcagcatggtcgcctcggggaagcgctcgatgaccttgaggccggccgccggccggctcaccaggcgactgaaggcctgctcggcgtcctgcagttcgcggtcgatgcccggtcgatagcagttgccgtccaggcagcggttgatcgggtcgggacgcgcattgaggtcgccgtagcgacgcagcagttcttcggcgaaggccttcttcggctgcttctccggcaatcccagcgcgctcggcgtgtcgtcgtcgaaggcctggtagtccatccacatcttcagcttgccgctgttctggtaccagtcgtcgagcaacggctggcgcgcgtcgaccggcatcaggcggaggaagttctgctcggcgccgttgcggatcaggtcgaagtacagccgcgtctgcgcctggtgcgagacgttgccgaagacatcgaagttcaccaccagcccgtagtaggttcgctcgaacagcggatagtccatcagccacagggtctgcggtacctcgccaagcaggcccttgcgcaccgaggcgctgtcgaactggcggaagatgctcagcagggcgttgtcgttgccgtgccagagcgtgttccaggtcggcggcggcgcgtcggcgtagacgtcctggcgcaggtcttcgtactcgttgcgcttgtcccggtaggcgctccacaggccgagcaggttcttcagctcgtcgatctgccccggcaaggccagcagcggctcgctctgcgcgcggaagttggcgtcggtgacgaacaggtcctgctcggggtcctggaataccacccagaagttgtcgcggatcacgtcggtggcgatctgtccacggcacaccggcccgcggatgaaggtacgggtgaagtattcggcgttatccagcatgaactggtagcgcgcccgtggcgggatcgcggcgaaggtggcgaacgggttggcgcggctctgcacgccgtagccgggaaccttgtcggtgttccactgggtgccgaagaacagctcctggacgcgttccagcttcttcgccgtcagcggataggtgatgtgcgtcttgtgtacgatcacgccctggatcggccagaggcggtaatagaagctgttgcccggatcgtcgttgggacgccgggtcgggatcgggtcgatcggctggccgctgggcgtgcgcgaacgcaccagctggaagaagtggccgggcgcgccctgctccgggaaatacaggtgcgccaggaacaggtgctcgtagagccagcgcgagaccaggctctgcttggccccaggctggttgaggaaacgctcccagctggccacctggcgcgcctcggcggcggtcggccgcaacggctgctggtcgaccggggcgcccgcggccagccacttctgcaaggtggcgtattcgtcgtcgctcagcccggccaccgcgaaaggcatgccggaacctgggttcttgcggatgaacgcatcgatgctggccggcgtcgggcactggttggcgcggttgatcgaaatgtccaggccttcggggatcttcgcattcggctgcaacggctggctgtggccaagctcgagcatccgcgccatcagtgcggcctggccgtcctgcgattcgagcaccgaccagaagtccttgcgccgccaggcgtcggcaccgtgcgcatcgaggtacaggcgggtggtttcctgcgccttggtccgcgtgccgtcgtagaccggcagttggttggcgccgcgctgcgcgccctcggcgctgctcaggttgagctggcagggcgaatcgtagcaggcgtggcaggcgacgcatttggcggtaaagatcggctggacgtcacggctataggaaatttcagcagcggaaacagactggataaaagacgacaaaacgaaggccaacccaaccaacggtcttggcaacatgaaccactcctcactcggcgacgggcgattctagcaaacccgcctctctgcgccgcactttcacaacggcgggcgaacgcgccccgggcatgagccgccatttcgccagcattccaccggcttcggccgccacgtatgctagccgggctcccaggcccgccctggcgatcaaggacgatgacttcgaggaaacagggatatgtttcgactcgccgcgccccatccgcgccggttcgcgtgcgccccacgtcccctcttcgccgctttccgcctgctgtcgtcaggcggcgcttccgttcgcgcccggcgcggcctggtccatcctttcgccgccctggcggcccaacggagaacccgccccatgaaactgctcgccggcagcttcgccgctctcttcctgagcctttcggcccaggcggcggactgtactttcacccagctggaaatcgtgccccagttcggctcgccgaacatgttcggcggcgaggacgagcacgtccgcgtgatgttcagcaacgaggatcccaacgacgacaaccccgatgcctttcccgaaccgccggtctacctggccgaccgcgacagcggcaacgattgccgcatagaggacggcggcatctggtcgcgcggcggcgtgttcctgagccaggacggccggcgcgtgctgatgcatgaattcagcggctccagcgccgagctggtgtcctacgacagcgccacctgcaaggtggtgcaccgcgaggacatctccggccagcgctgggcggtggacaaggacgggctgcgcctgggtgagaaatgctcgggcgaatccgtcgacagctgcgcgaagatcgtgaagcgttcgctcgcgccgttctgccagaccgcaaagaaatgatccgggccggagcgccccttatcgacacgcataggtgatacatggacagtctcgatcaatgcatcgtcaacgcctgcaagaacagctgggacaagagctacctggccggcaccccgaacaaggacaactgttccggcttcgtccagtcggtggccgccgagctgggcgtaccgatgccccgcggcaacgccaacgccatggtcgacggcctggagcagagctggaccaagctcgcctccggcgccgaggccgcgcagaaggcggcccagggcttcctggtgatcgccggcctgaagggccgcacctacgggcacgtcgcggtggtcatcagcggtccgctgtatcggcagaagtacccgatgtgctggtgcggcagcatcgccggcgcggtcggccagagccagggcctgaagtcggtcggccaggtatggaatcgcaccgaccgcgaccgcctcaactactacgtctactccctggccagttgcagcctgcccagggccagttgattcaggccgtgctgcgaatgagccagactcattcgcagcacgattccccacgagcatcccgactccactcgcccgccccttcgccgcccgcctgcgcactccgacctccgcattccgcccgtatgctgcgacaaaacggcgccaggggcttttccggcccgcggatgaacatctttcaacttgaatgaaattcatggtccagccacccccggtcggaaagcccctgcctttgttatgcttttcacctttccgcccactgacgccaggtccatccatgtccagcccgctcaccgatcgcagcgcccgcctgcaagccctccagcacgccctcagggaacgtatcctgatcctcgatggcggcatgggcaccatgatccagagctacaagctggaagaggccgactaccgcggcgagcgcttcgccgactggccgagcgacgtgaaaggcaacaacgacctcttgctgctgagccgcccggacgtgatccaggccatcgagaaggcctacctcgacgccggcgccgacatcctcgagaccaataccttcaacgccacccaggtgtcccaggccgactacggcatgcagtcgctggcctacgaactcaacgtcgaaggggcgcgcctggctcgccaggtggcggacgcgaagaccgccgagaccccggacaagccgcgcttcgtcgccggcgtgctcggcccgaccagccgcacctgctcgatttccccggacgtgaacaaccccggctaccgcaacgtcaccttcgacgaactggtggagaactacgtcgaggcgacccgcggcctgatcgaaggcggcgccgacctgatcctgatcgagaccatcttcgacaccctcaacgccaaggcggcgatcttcgccgtccagggcgtgttcgaggaactcggcgtggagctgccgatcatgatctccggaaccatcaccgacgcctccggccgcaccctgtcgggccagaccaccgaggccttctggaactcggtgcggcatgcccggccgatctcggtaggcctgaactgcgccctcggcgccaaggaattgcggccgtacatcgaggaactgtcgaccaaggccgacactcatgtctcggcccaccccaacgccggcctgccgaacgccttcggcgaatacgacgaatcgccggcggaaatggccgtggtggtcgaggaattcgccgccgccggcttcctcaatatcgtcggcggctgctgcggcaccaccccggcgcacatcgaggcgatcgccaaggcagtggccaagtacccgccgcgggccatcccggagattccccgggcctgtcgcctgtccggcctggagccgttcaccatcgaccgcagctcgctgttcgtcaacgtcggcgagcgcaccaacatcaccggttcggccaagttcgcccggctgatccgcgaggaaaactacgcggaagccctcgaggtcgcccagcagcaggtggaagccggcgcccaggtgatcgacatcaacatggacgaaggcatgctggactcgaaggcggccatggtcaccttcctcaacctgatcgcctccgagcccgacatctcgcgcgtgccgatcatgatcgactcctccaagtgggaagtgatcgaggccggcctgaagtgcatccagggcaagggcatcgtcaactcgatctcgatgaaggaaggcgtcgaggccttcaagcaccatgcccgcctgtgcaagcgctacggcgccgcggtggtggtgatggccttcgacgaggacggccaggccgacacccaggcgcgcaaggaagaaatctgcaagcgctcctacgacatcctggtcgacgaagtcggcttcccaccggaagacatcatcttcgatgcgaacatcttcgccatcgccaccggcatcgaggaacacaacaactacgcggtcgatttcatcaacgcctgcgcctacatccgcgacaacctcccctacgccctgagctcgggcggggtgtccaacgtgtccttctcgttccgcggcaacaacccggtacgcgaggcgatccactcggtgttcctctactacgcgatccgcaacggcctgaccatgggcatcgtcaacgccggccagctggaaatctacgacgagattccgaaagcgctgcgcgaccgggtcgaggacgtggtgctcaaccgcacgcccgaggccaccgaggccctgctggcgatcgccgacgactacaagggcggcggcgcggtcaaggaggccgaggacgaggaatggcgcagctacagcgtcgagaagcgcctcgagcatgcgctggtcaagggcatcaccacctggatcgtcgaggacaccgaggaatgccgccagcagtgtgcgcgtcccatcgaggtcatcgaaggtccgctgatgtccgggatgaacgtggtcggcgacctgttcggcgccggcaagatgttcctcccgcaggtggtcaagtccgcgcgagtgatgaagcaggcggtggcccacctgattcccttcatcgaggcggagaaaggcgacaagccggaagccaagggcaagatcctgatggccacggtgaagggcgacgtgcacgacatcggcaagaacatcgtcggcgtggtgctcggctgcaacggctatgacgtggtcgacctcggcgtgatggtgccggcggagaagatcctgcagaccgccatcgccgagaaatgcgacatcatcggcctgtctggcctgatcacgccgtcgctggacgagatggtccacgtcgccaaggaaatgcagcggcagaatttccagttgccgctgatgatcggcggcgccactacctcgaaggcgcataccgcggtgaagatcgatccgcagtacagcaacgacgcggtggtctacgtcaccgacgcctcgcgcgcggtaggcgtggccaccagcctgctgtccaaggagctgaaggccgactacgtggcccgcacccgcgccgactacgcggtggtccgcgaacgcacggccaaccgcagcgcccgcaccgagcggctgagctacgaacaggcgatcgccaacaagccggcgttcgactgggccggctaccaggcgccgacgccttccttcaccggcgtcagggtgctcgacgagatcgacctcgcggtgctcgccgagtacatcgactggacgccgttcttcatttcctgggacctggccggcaagtacccgcgcatcctcaccgacgaggtggtcggcgaggccgccacctcgttgttcaacgacgcccaggcgatgctgaagaagctgatcgacgagaagctgatcaaggcccgcgcggtgttcggcttctggccggccaaccaggtcgagcacgacgacctggaggtctacggcgccgatggcgagaccctcgccaccctgcaccacctgcggcagcagacgatcaagccggacggcaagccgaacctgtcgctggccgatttcgtcgcgccgaaggaaagcggcgtgcgcgactacatcggcggcttcatcaccaccgccgggatcggcgccgaggaagtggccaaggcgtacgaagccaagggcgacgactacaacagcatcatggtcaaggcgctcgccgaccgcctcgccgaagcctgcgccgagtggctgcacgagcgggtgcgcaaggagtactggggctacgcccgcgacgaacacctcgacaacgaggccttgatcaaggagcaatacgtcggcatccgcccggcaccgggctacccggcctgccccgaccataccgagaaaggcactctgttcgaactgctcgatccgcagggcctgtccggcgtcagcctgaccgagcactacgcgatgttcccggccgcggcggtcagcggttggtatttcgcccacccgcaggcgcagtacttcgcggtcggcaagatcgacaaggaccaggtggaacgctacagccagcgcaagggccaggaagccagcgtcagcgagcgctggctggcgccgaaccttggctacgatgactgaccaggaaggcgacgatgaaattcctcactcccgagcagatggaaaagccgcgcaagcgccgcctgcgcaagaaactgcgcctgggcgagttccaggagttcggcttcagcttcgaactgacctacgaccgcaacgccctctcccacgacgatgcgctggaccatctgatcgacttcgtcgaggcccagggctgggtgttcggcggtggcggctcgccggaacaggcggagatcagcggctacctgtgcctggcgcgggtcggcagcctggacgaggcggaccgggaaagcgcccgcctgtggctggaagcccaaccctggtgcaagaccttcgaggtcggcccgttgagcgactgctggcacaacttcttcgagtgaaaccggcgccggcacgacctggcctggcgccggcaggcgcgaagctgcgacctacacccggatcaggcgcggttcatgccccgtgtgggcgaggaaagccagcaggtctgcgtagcggatgcactcggtggcggtattcaccaacgggtggaaaccgagcaactggtcctggcggatggcatcgtcgagcaacacctcgaccctgtgctgcggatcgttgaccagcgcgaaaggcgtcacgcagcccagttcgacgccgaggtattcgcgcaggcgctcgaccgaggcgaacgacaggcggctttcgccgatctgttcggcgatgcccggcaggtcggcctccttgcgctcgtcgagcagcaccaggtagtggcgagtacccttgcggttgcgcaggaacaggttcttgatgccctggtcgggcaattcgatgccctgcgcgtaatattcctcgatggaggcaatcgcgggatgctcgacccgctggctgtcgatggccagctcgcggagcaacgccagaagcgcctgctcgtccattttcgcactcatgggacgcgcgccctcaggtgaactgcgaaccggaacggcgcacgaacttgatcgaccacttgaagttcggcttgcgcgtcacgctgatcgggcgccgggtcacggtatcgatggtgatgttccagaacccggtgctgggcaccttgatcttcgccgggaagcggtcgaaggcgccgccatggtagctatgccgcccgccattcttgaaactgcggaaattggcgtcgttcatcaggcggatattgcattgctgcgagcactcgatgaccacgatgtcgtcttcgttgaggtgttcgcgctggtggacgaatttcatggaacggttccgttgctgcggtggagcggagcgcaacgatagcacgtcggcgccggccataccgcctcatgacgggcaatggtaggatgcgcgccccatgcgtagccaagacctccaccagcgcctcgccgatctcggcgccaagcccctgcattgcgggaggatcgtccgcgcctggctgcagggccgcgccctcgatgcctgcaccgcccgccagcgggccgaggacttcctgccgctgggcgtacgccatggtctgccccaggtagcagcggaactggaaggcatcgcccgcctgcacagcgagcatccggcgagcgacggctcgtcgcgcctgctggtggaactggccgaccggcagatggtggaaagcgtgctgctgccgcgcggtgggctgtgcgtctcgacccaggtcggctgcgcggtcggctgcgtgttctgcatgaccggccgcagcggcctgctgcgccaggtcggcagcctggagatggtcgcccaggtggtcctggcgcgccgtcggcgagcggtgaagaaagtggtgttcatgggcatgggcgagccggcgcacaacctcgacaacgtcctcgaagccatcgacctgctcggcaccgatggcggcatcggccacaagaacctggtgttctccaccgtcggcgatccccgcgtgttcgagcgcctgccccggcaacgggtgaagcccgccctcgccctgtccctgcacagcacccgcgccgaactgcgccggcaactgttgcccaaggcgccgccgctgagcccggaagaactggtggaagccggcgaggcctacgcccgccgggtcgactatccgatccagtaccaatggaccctgctcgaagggatcaacgacagcctggaggaaatggacggcatcctgcgcctgctcaagggccgcttcgcggtgatgaacctgatcccctacaacagcatggacggcgacgcctaccggcgcccgagcggggagcggatcgtcgagctggtgcgctacctgcacagccgcggcgtgctgaccaaggtgcgcaactcggccggccaggacatcgacggcggctgcgggcaactgcgcgccagggccacgcagggcacggtggaacggcgcatccccgcccgccaggcctgaagccaccctcctcccgccaagggtctagactctcagggcaggtatggaaaagggaggaccaccgatgggtatcgagacggaagaaccgaaccagaagccgccgaccttctggcagatgctgcatagcgtgatggctgccgccttcggcgtacagagcgggcgaaaccgcgcccgcgacttcacccacggcaagcccgtgcacttcatcatgctgggcctgctcttcaccctggtgttcgtgctgttgctggccgggatcgtgaaactggtgctgagcctcagcggcctgtgacctctgcgccgccgaggcgggctttcactggtggctgacccagaacaccgcggtagccaccaccagcaggatcaggacgaaggccgcgcgggcgtcgaccacgctgtcgcggttttcctgggttttgctcggctcgctcatgactccccctgtttcttgtgggtatcgggacgaagacatcgaaaggcactctccagttaagaccagcgccgcccatcgctcaagaaaggcgccgttgcgaagcggttatgcttgcctggcgacttagtctttttggttcttaccatatactcaaacatcacttttacgcataaatatgaactggtatcgtgcgcccactccgcgtggagcgcgtagccgtgcgcgctggttaacgcagtaagccgcatagcctgacagcaggaatattcatgtacgtatacgacgagtacgaccaacggatcgtcgaggaccgcgtcaagcagttccgcgaccagacccgccgttacctggcgggtgaattgaccggtgaggagttccgcccgctgcgcctgcagaacggtctctatatccagcgctatgccccgatgctgcgcatcgccgttccctatggcctgctctcctcgcgccaactgcgcaagctggcgcagatcgcccgcgactacgacaagggctacgcccacatcagcacccggcagaacgtgcagttcaactggccggagctggaagacgtgccggaaatcctcgccgagctggccaccgtgcagatgcacgcgattcagaccagcggcaactgcatccgcaacaccaccaccgaccagttcgccggcgtcgcccgcgacgagctggtggacccgcgcccctggtgcgagatcatccgccaatggtcgaccttccaccccgagttcgcccacctgccgcgcaagttcaagatcgcggtgaacggcgcggtgagcgaccgtgccgccatcgaagtgcacgacatcggcctggaggcggtgaagaacgaggccggcgagctcggcttccgcgtctcggtcggcggcggcctgggccgaacccccatcgtcggcagcttcatcaatgaattcctgccctggcagcacctgctcggctacctggatgccatcctgcgcgtctacaaccgctatggccggcgcgacaacaagtacaaggcgcggatcaagatcctggtcaaggcgctgaccccggaagtcttcgccgagcgcgtcgaggccgaatgggccaacctcaaggacggaccgagcaccctcaccgaggcggaagtccagcgcgtcgccgcgcatttcgtcgatccggcctacaaggccctcgacgacctcgacgagtccctcgcccggctcgacgcggagcaccccggcttcgcccgctggcgcgcacgcaacaccttcgcccacaagaagcccggctacgtcgccgtgacgctctcgctgaagcccaccggcaccgcgccgggagacgtcaccgacaaacagctggaggccatcgccgatctcgccgaccgctacagcttcggcgaggtgcgcaacagccataaccagaacatcattctcgccgacgtcgagcagggcgaactcttcgccctctggggcgaactccgcgaactgggcttcgccacccccaacgtcggcctgctgaccgacatcatctgctgccccggcggcgacttctgctccctggccaacgccaagtcgatcccgatcgccgaagccatccagcgccgcttcgacaatctcgactatctattcgacatcggcgacatcgacctgaacatctccggttgcatgaacgcctgcggccatcaccatgtcggccacatcggcatcctcggggtagacaagaaaggcgcggagttctaccaggtctccctcggcggcagctcggcgcgcgacgccagcctcgggcagatcctcggcccgtccttcgcccaggagcagatggccgacgtgatcgacaagatcatccaggtctacgtggaacgccggaccgaggaagaacccttcatcgacaccttccgccgtatcggtatcgacccgttcaaggagcgcgtatatgcagcgaatcattaaggaccgccaggtggtcgacgaccgctggcacttgctgcccaaggacgcgaccctggaaagcgtacccaacagcgacgacgtgatcatcccgctggccctgtggctcgagcacggcccggccctgcgcggccgcgacggcggcctgggggtctggctggacgcggacgaggagccggaaagcatcgccggcgacctcgacaggttccaggtgatcgcggtgaacttccccgcctttaccgatggccgcggcttcagcagcgcgcgcttgctgcgcgagcgctacggctacaagggcgagatccgcgcgatcggcgacgtgctgcgcgaccagttgttcttcatgcgccgctgcggcttcgacgcctatgccatccgtgccgaccgcagcccggaagacgccctggccagcctggacgacttcagcgaggtctaccagacctcggtggagcagcctctaccgctgttccgccgccgcggctgacccccgccctgacggaaaagccccgcagccgcggggctttttcattcccgaggtcacggacgcctcaggccgcccgcacgctgtcccaggccacctgcgccagcagttcgcgacagtcggccaacgccacccgggttcgcccggccagccactggcgggcaaggtcgtgggccgggccgatcaccaccgaagcaaagcagtcgtccggcatctcgcggaacaggccctcggcccgatatcccgccagcgccgcatggatccgtgcgaagtgcgcctggttgtcggcccgcaggcgctcgcccagctcccccgcctccacccgcccgcggctgtgcaggatgaagcgtgcccagtcgggattcgccacgacccagtcgatgtagctggtgaccagcaacctgaccgtttcctcggcgctgcgcgccctggcgaagccggcttcgagcaacgccgcgtactggccgatcccggccaggtacagttcgccatggatgcgttccttgttgccgaaatggtggtagaggctaccgatgctcgctccggaacggtcgcggatcatctcgatggtggtggcgtctacgccatgctcgctgaagcaggccagggcggcctggagaatctcgtctttgcgggaagaacggcccatgtcggtccttgtcgttaatcgtcgaaacgctgactagaatatttttctagaataaatttctaaccttcgtatactgccccggtgcgcacacatcttcaatcctgaaacgcccggagttttccatgagtcagatgatgcagatgtaccagcaggtcggcccggcccagttcagcgccatgatcggccagttcgcaccctatttcgccagcatcgccccgcagttcgtcgaactgcgtcccggctatgccgaagtcaccttccccaagcgccgcgaggtgctgaaccatatcggcacggtgcatgccatcgccctgtgcaatgccgccgaactggccgccgggactatgaccgacgcctcgattcccgccggccatcgctggattccgcgcggcatgaccgtcgagtacctggccaaggccactggcgacgtgcgcgcggtggccgacggcagccagatcgactggcaagccaccggcaacctggtggtgccggtggtcgcctatgtcgacgacaagccggtattccgcgccgagatcaccatgtacgtcagccaggcctgaccgccaaggcgccccggccgtgctttcggccggctggaggcgccctggcggccagctctattctcgaagccatgagcagaccacggagaccggcatgaaccctccgcaaccacgcctcatcgataacggcaacggccatccgctggccagccattggtaccggcctgccggggagccgcgcggctatctcctgatcgtcccggcgatgggagtggaacagcgcttctacgcgtccttcgccgcctggctggcagagcgcggctacctggccatcaccttcgactacctgggcatggggcaatcgcgcaacggctcgctgcgcggtctcgaggtcgatgtgctgggctgggcccgtcatgactgcagcgccatgctcgccgccgcgctcgccgagagcgggagcaagcccctgtactggatcggccatagcctgggcggccagatcctgcccttcgtcgaagggcgcgagcgtatcgatagggtcttcagcatcgccagcggcagtggctactggaaggaaaacagcccgcggttgcgcaacaaggtctggttgttctggtacctcgtcgcgcccctgctgacgccgctgctcggctattttcccgggcgccgcctgggcatggtcggcgacctgccgcgcggggtgatcgaacaatggcgacgctggtgcctgcatccgcagtacgccctcgcggatggcgaggccatccgccgcgccttctccgccgtacgcacgcccatcgtgtcgctgtcgttcaccgacgatgaaatgatgtcccgacgcagcatcgagtcgctgctgggcttctaccgcgaagcgccgaaaaccgcctggcgcatcgctcccgaggaaatcggcgcccgccacatcggccatttcggcttcttccggccgcagttcgccgaatcgctatgggcgggctacctgttgccggagctgggctccggcaacgccctcagccgaggttgaccagcacccggccgaccagcttgccggcgaggatctggttgatcgcccccggcagctcttcgagggcgatctcgcgcgccacctcttcgaggttgtcgagcttccattgcagcgacagcttgtcccacatggatgccttgaccaccagcggcagctccaccgagtccaccccgagcaggttgaccccgcgcaggatgaacggcagcaccgaggccttgaagccggcgccggcggtcaggccgcagcaggcgacgctgccgccgtactgcaacgacttgaccacgttgaagaggatgtcgccgccgacggtgtccaccgcgccggcccactgttccttgagcaacggcttgtcgacgccatcggccacggtggcgcgatcgaggatctgcttggcccccaggcggttgaggaactcggcctgctccagcttgccggtggcggccgccacggtgtagccgagcttggccagcagttccacggcgatactgccgaccccgccgctggcgccggtgaccagcaccgagccatggtcggggcgcaggccgctgcgctccagcttttcgacgcagagcgccgcggtcaggccggcggtgccgaggatcatcgcctcgcgcaggctcaggccttgcgggcgcttgatcacccaggccgcgggcacgcggatgtactggccgaaaccgccggcggtgttcatgcccaggtcgtagccggtgacgatcacctcgtcgccggccgcgaactcggccaccgaggactcggcgaccacaccggcggcatcgatgccgggggtatgcgggtacttgcgggtcaccccgcggttgccgctggcggacagcgcatccttgtagttcagcgaggaatactgcacgcggatcagtacgtcgcccgccggcaggtcgccggtatcgcgctcgaccacctgcgtttcgtaaacgccgtggggcgcttccgtcacccacaacgccttgaatacagccatttcgacctcctctcgtgaaaaccctgaagacagcgtgttcgtccctgtcggcgccggcctattgccagaacttctgctggttgagccgcccccaccaggtcaccagcacgcggtcgataaccacgctggcggccaggccgacgcgttcctgcaggctcttgcgctcgacaaattgcacctggtagacatcgcgctccctggcctgctcggccaggtactcgtcgctggtcttgagttcgtccaccagcagcttgcccagtgcggcctggcccagccagacctcgccggtggcgatctcgtccatgttcagttgcggccggtagtgggccacgaagttcttgaacagttcgtgggtcacctccaggtcctcctggaacttttcccggcccttctcggtgttctcgccgaataccgtcagcgtacgcttgtattcgccggcggtaagcacctcgaagtcaatatcgtgcttcttcaacagccggtggacgttgggcaactgcgccaccacgccgatcgagccgaggatggcgaagggcgcggaaaggatccgatcgccgatgcaggccatcatgtagccgccgctggccgccaccttgtcgacgcacacggtcagcggcacgccggcctggcggatgcgcgccagttgcgaggccgccagaccgtagccatggaccatgccaccgccgctttccaggcgcagcaccacctcgtcgtccttgcccgccatgctcagcaccgcagtcacttcgtggcgcagttgctcggtagccgaggccttgatgtcgccgtcgaaatcgagcacgtagacccgcgacttctgttcaggatgtttcttcgcctgcttcgccgccttgctctcctccttgcgcaaggccttgaggctggccttgtcgaggacgctgtggcggacccgctcgcgcaggtccttgtagaaatcgttgagcttctgcacgtcgaggtgcccgcctgcgccgcgccggccgcggccgcgcagggcgacgatcaccaccagcaccacgatgatcgccgccagcacggtcacggtcctggccagaaagcccgcatattcggcaatgaactccacacaaccccctctctactgttgacgcacccgtctacgggcgacacgattgcgcaagcatacccaggccaccgacgggcggccagcgatgccactgcctggagagcctttgcagggcgcgcccggagcagccgataaaggcagcgaatgacattcaaacaagcgtatgttttttcgttgacagccctgggtgatcctcataccctcgcggaactttcacccgccgaggtccgcccgtgggcagcatctacctgattcgacatggccaggcgtcgttcggtgccgacgactacgacgtgctgtcgccgaccggcatccgccaggcggaaatcctcggcgaccacctgcggaacctcggcgtccgtttcgaccgcgtcctcagcggcggcttgcgccgccagcagcacaccgcccgcgccgccctcgaacgcctggagtcctccgggctggccacgccggagctggaagtcgatccggcgttcaacgaattcgaagccgacgcggtgatccgcgcgcacctgccggacctgctcgatgagcagccggaagccttgcacatccttcgccatgcggccgagcatcgggccgagttccagcgcctgttctccaccatcatcgcgcgctgggtttccggcaaccatgagaaagatgggctggaaagctggcaggaattcctcgataaggtccatgacggtcttcgtcgtctgctggcgcaggccagcggcaaggacagggtcgccgtgttcacctccggcggtaccattaccgccctgctccaactgatcgtcggcgttccgccgctcaaggccttcgagctgaactggcagatcgtcaatacctcgctgactcgcctgaaattccgcggcgaggaagtgtccctggcttccttcaacagtcacgtgcacctggaactgttgaaggcgccggaactcatcacctatcgatgagccggcctaccgcgaccgttccggtcgccgaaaaaaccctagaagaaaggaatagaacccatgaccaccgttgctgacatcgtctccaccatgaaaagcaagttcaacgccagcgcggccgccggcctggatctggtgttccagttcaacatcgaagacggcgacaaccactacctggtcgtcaaggacggtacctgcgaagtggtacagggcgacgccgagaaccccaacgtcaccctgatcatggacagcgaaaccctgaagggcatcaccagcggcgagaccgacggcatgcaggccttcatggccggcaagctgcgcgccgaaggcgacatgatgctggcgatgaagctgggcgaactgttcccggtctgatcgtttccggcgccatgccagaaggaaaaccggagtccctcgcggctccggttttttttcgtccggcattcctccaggccgacgatcagggaccgtgatggagcggcaacacgcttgcccataacgcccggcggcggcttgtgagggccgggacagggcattagattagccaattatcgccggtcaccatcattgcgcagcctgatgcgcgcaccggctcccgcggctccgccgtggcaccacgagaagggaaccccatgtcgctgaccgaccaatccactcgcatccgcgccggcgaagaactcgacgccgccgtcatcgacccgtacctgaaagcccatatccccggcctcgaaggcaccccgaagatcagccagttccccggtggcgcgtccaacctgacctacctgatcgagtatccgcgccaggagttcgtcctgcgtcgcccgccattcggccacaaggccaagtcggcccacgacatgggccgcgaataccgcatcctgaaccagttgaacgcaggcttcccctactgcccgaaagcctacctctactgcaccgacgagtcggtgatcggcgccgagttctacgtcatggaacgggtcaagggcatcatcctgcgcgccgaactgccgccagagctgaatctcgacgaacaacagacccgcagcctgtgcaagagcttcatcgacaagttcgtcgaactgcacaacgtcgactacgccgcctgcggactggccgacctgggccgcccggacggctacgtgcagcgccagatcgccggctggaccgaccgctacgagaaggccctgacccccgacgcgccgctctgggaaccggtcaaggcctggctcaaggacaagcagccggccgatcaccacaagccgggcatcgtgcacaacgactaccgcttcgacaacgtgatcctcgacccggacaacccgatgcagatcatcggcgtgctggactgggaactggccaccctcggcgatccgctgatggacctcggcaataccctcgcctactgggtggaagccggcgacccggctccggtgcagctgacccgccgccagcccagccacctgccgggcatgctgacccgccgggagttcgccgactactacgccgagcgagccgggatcccaccgatcgacaacctggacttctactacacctatggcctgttccgtcttgccggcatcgtccagcagatctactaccgctactaccacgggcagacccaggacaagcgtttcgcccagttcgtgcagatgaacaagctgctggagcagatgagcctgcaggccatcgagcgctcccgcctgtaaccgaccactacaaggggatagcccatgtccaagacccacctgttcgacctcgacggcaagatcgccttcgtttccggcgccagccgcggcatcggcgaggcgatagccaagctgctggcccagcaaggcgcccacgtgatcgtctcgagccgcaagatcgatggctgccaggcggtcgccgacgcgatcaccgcggagggcggcaaggccaccgcgatcgcctgccacatcggcgagatggagcagatccagaacgtcttcgcacagatccgcgagcagttcggccgcctcgacatcctggtcaacaacgccgccaccaacccgcagttctgcaacgtactggaaaccgacctcggcgccttccagaagaccgtcgacgtcaacatccgcggctactacttcatgtccatcgagggcggcaagctgatgaaggaacacggcggcggcagcatcatcaacgtggcctcgatcaacggcgtatcgcccggcgagttccagggcatctactcggtgaccaaggccgccgtgatcagcatgaccaaggtcttcgccaaggaatgcgcgcagttcggcatccgctgcaacgccctcctgccagggttgaccgacaccaagttcgcttcggcgctggtgaagaacgacgcgatccgcaacctcgccctgcagcgcatcccgctcaagcgcgtggccgagccgagcgaaatggcaggcgccgtgctctacctggctagcgaagcgtccagctacaccaccggcgtggcgctgaacgtcgacggcggcttcctttcctgacggaacggcgaacgcgcgaagagggagccagggctccctcttttcatttcaggattgccaatgcctcgcaccagcgcgggacaggcgccccacggctattcacctgcgttctcgggtagccggacgagtacccccataggtgttacccgccgcctccacttcagttgccgacccgccagccaccgttcaccgacaccaccgttccggtgacgaaccccgcctcgggcgaggccagccaggccaccgccgcggcgatgtcctcgacccggccggtcctgcccagcggggtctcgccgacgatggcggcgacccgttgcggatcgaggccgccgggaaagaaccgggtgtcggcgatgtaacccggcgccacgctgttcaccgtgatcccgcgcgaaccgagttcccgcgccagggccacgccgaagccatgcaggccggccttggctgccgcatagcccagcgcaccaggactgccgctaccggtctgcgcagcgatcgatccgatatggatgatccgcccgccctcttccgcgaaatgcggtaacaccgccagcgacatgaggaacgcgcttttcaggttgccgtccagcagcgcatcccattcccgctcggcctcagccagcggagtggtggcggcgatctttcgggtgaacccggcgttgttcaccagcacgtcgagcccctggaaggtgtcgccaacccaggcggccaccgcctcgacagcttcgcggcgggaaagatcggcggccatccagggcacaccgcccaactcggcggcagcgcgttgcaggcgctgggaatcacgggccaccagggcgatccgataaccctgttgccgaaggcgccgggcgatggccaggccgatgcccgacgagccgccggtgaccagggcggtacgggggattggagaatgagtgtgcatgacgggcttcctctgtaatggatggaacgcctcgtctggccagagcgagcgtacggatggattctcgacggatccgccgcgatatatccaatactgtctttcttaactcaccatatccgggagatatcgcaatggccgacttacgccagttccgccagttcgtcgcggttgccgaggagctgagcttccgccgcgccgctgagcgcctgcacatggcccagccaccgctgaccactgcgatccggcggctggaagaagaagtcggcgccagcctgctggagcgtgacaaccgtatccaccgcctgacgccggcgggccgcgcgttcctcgacgaagcccggcgcaccctggcccaggccgaacgcaccctggcggccgcgcgcagcgccgccagcggacgcagaacgttgcgcctggcgttcgtcgacagcaccatcaatattctgctaccgcgcatactccaggcgttccgccaacagcatggcgcgctggacttccagctccaggaagacaccaccgcggggcaactggaggcgttgcgcgaagaccgcatcgatgccggcctgatcgtcctgccggtcgaccgccagcccggcctgtacacacatctactggtggacggcgacatgcgcgtggcattgcccgaagggcatcggctggcacgctatgcgcgcctgcgcctggaacaactggccggagaaccctggctgctgtttccacggcactatgggccgggcatgcacgacctgatcgtcgccgcctgcgcggcagccggcttcgtcccggaggtggtgcaggaggcgcggcagatgcagaccatcgccgggctggtggccggcggcatcggcgtcgcgctagtgccttcgctgctacaaccgttgcgcccgccgggggtcacctttcgtcccctgcaagggcggcgggcgcgaattccctatcggctggcgctggcctaccgcacgccgtcggaactcatcgaacgctttcgcgaaaccgcccaggcgatcgccgccgccccggtttttcgcatggcctagcgccagtccctgagcgcctcctcggccgccaggttcatcggctcggcaagcagcccggcgacgccgtagttcaccgcgaacaccgccttgtccgccatcggcaggaaagtcacccgccccgccagcggctcgaacaggaacaggtcgtgctcgccggcccgcagccagcgccagagatcgacccccagcggactctgcgacaagcccaggcggcggccccgggactgctgctcgagagccaggaagcggccgctgagcgcgtcgaggcgatagcccggcgccagaccgatcaacgcggccagccccttccagcggaaaatccgcgcgtccagttgccagagttcgccgtccagcaccacgctgcgctcgttggcgccctcctggatcagcacccggtagcgctgcggcccttcggcctggaagctcagggtggccatcggctgctcgggcttgagcagcgaatagctgcgcaggtcccaggcgagcaccagcagcagcgccgccacggcgacgaaggccaagccgcaggtgccgcgcagccagccgaggaaccaggtgcgttcgaagaggatgcgcaccgcgaccagggcggccagcaaggccagtaacgcgaatgcccaggccagaccgtcgtactgcatgcaagcgattccttctgcgtgaaattgcgggcattatgcgcacccctcctcccgacggccagcgaggccgtttcccgattggaagcaggtccggtttttcatgcccttcgaactcgcgatagaccccagcaccctgatcatcctggccgtggtggcctttctcgccggcttcatcgacgccatcgccggcggcggcggcctgttgaccatccctgcgctgctcaccgccggggtcccgccgcacctggcgctgggtaccaacaagctgagctcgaccttcggtgcggcgaccgccagctacaccttctaccggcgcaagctgttccatcccgggaagtggcgcaacggtctgctcgccaccgcgatcggcgccgccataggcgcctgggcggctcacctgctgcccgccgagtggctgaaccggatgctcccggtggtggtattcacctgcggcctctacatgctcttcggcggcacgccgaaggcgccgctggacgccgatgcgccgctcggacgcaagcgccagtggccgcagggcctcgccctgggcttctacgacggcgtggcgggaccgggcaccggagcgttctggaccgtcagctcgctgctcatgtacccgctggacctggtccgcgccagcggtgtggcgcggagcatgaacttcgtcagcaacatagtggcgctggcggtgttcatcgcctccggccaggtgatctggttgctcggcctgtgcatgggtgcgtcgctgatggtcggcgcctatttcggcgcgcgcaccgccatcggcggcggggcgaagttcattcgcccggtgttcatcctggtggtcctggcgctgaccgcgcggctagcctggcagcactggttcagcggcgcctgagcggcgcgccaggtacaggtcgatcaggtgccgggcgatcgagcgctgcgccggtagcggcggcaaggcatcgagggagaaccactgggcgtcctcgatctcgtcttcctgcgggacgatctcgccggacacgtactcggcgtggaaaccgagcatcagcgaatgcgggaacggccagttctggctgccgatgtattcgagattggcgacctccaccccgacctcttcgcgcacctcgcggaccacacactgctccaccgactcgccggcctcgacgaagccggccagggtactgtagacccccggcacgaagcgcggcgaacgcgccagcaacacctcgtcgccccgggtcaccaggacgatcatgctcggcgacaggcgcgggtactggtgcagcccgcactgcggacactgcatcacccgctcgtggtcctgcgcctgcatgcgtgtgccgcaattgccgcagaaccggttgtgacgtgcccagatgccgatctggctggcatagccgagcatgcagaactgatcgaaatcgccgtgcagcatgaactgccgcaacggcgcccaggccatgcccggcagctcgatcggctcgtccagttccagcacgtagaccggctcgccctgccaatggccgaccccatgttcggcgagcagcgggagttcctggcgcttcagccattcgcgggggaacagcaggccgttgtcgtcctggaggaagcgctgctgacagtgcgcgagcacccagccgccgacctgggcggtagccggccgacctgcctgccagcggaactcgccggccatcaggcggccaccggcagtccgagcgccttgacgctggcgctggccaggtcgaggacgtccggctggccctgcggacgcagcacggcaccgccctcgagatagtattcgagactggtcagggcgtcggcgagggtttccagcatctgctccgaaggcatctgcgcggtctcgatcatgcgctgctggatgtagtcggcgcagccgccgaccagcagcgcggcgcgctcctgaccgaggaaccagagaccgccccggaccgcctgcaggctggccgggacgttggccaggttgagcttgtcgccattggattccaggtacgcggtgatcgcacgcttggccagggccaggccggccttggcctcctcgatcaccacgatgcgcgcctcggccaactggtgcacggcgaacgcatcggcttcctgcccgggctccgccggagtcggccggatgatgcggcgctcgccgcgctcgaggttgccgaccatgctttccacgtagagcaccgcatcggccaggcgcagcaacgccggcggcgaatcggcgacgccgctggcagcccaggcggccacggtgggtagctgggtctgcagggcggtgccggccgagttcaggccgaccatgccgagggtcttgctcagcttgcccagttgcgcatgcaggttggtcaggctatccggctgggccacgccgcgctcgatcaggtcgagcatgtccttgaccccggcgagttcctcgcggatcgccgtggacagcgaacgcatcaccgactggccggggccggacaggcgctgcgattcctcttccagcaggtggtcggtgaacggcagcggcgccagcccatgcagttcgcggacctcgcgcgaacgcgggccctggccgtcggacagcgccaccaggtaaagcagttccttgagcagatggcgcggcgcctcgtaggccgggccgatcagcaattgcttgagctcgcggtcgatgcgcgagaacagttgcttgcgcgacttgcgcggcaacagttggccatcgacgatcgactcgatcgccgcggcgccgatccagcacagccgcgaacgggccaccccgccgtgcaggctgtcgaggcgcgccagcgcgcggcccatcagcttgaggctgggatagaggttctgttcgcggatcaggccgagcaggccgatctggtacatgtggcgcatccgccggctttcctcgcccagttcggcttcggaaggcaggtggtcgatggcagtgctcggcggccgcgggacatccaggcgggcgctgaagaagaagctttccggcagcgccggctgccctgcggcacagcgcacttcgttgatcgccggcaagagcagctcggggatctcctggcgattggcctcgacgttctccaggtagcggcgcagcacgtacagggcgttgcccagggctgccagctggccgtcgcgctcctcgctgacgccggtgggaatgtcggtcgccagctgcagggcttcctgggccagcagctcggcgccggccagctcgatcaggttgagggtgccgcggatctgttgcaggcattcgacggcgtgctgcagcaggctgccgttctgccgctcggcaatgaactgctcaagaccctgttcggcctgttccatggtggcgaacaactcgtcgcgcaccagactgagggacgtggctcctgtgaccatcggtctagtgcgcctcccgcgcaagaatatacaacggcatcaatcagcgaattccggcttctgcttggccatatgcgcggccatcgccacccgcaggtcggcggactggagcatggcggcgttccaggtagcgacgtactcgaggccgtcgtcgacccggtggtcgcgcatatagcggatcatttccttggtaccacggatggcgatcggcgacttcgcggcgatctgccgcgccagttcgaagaccccatccatcaatgcggcctggtccgcgtaggtacgattgaccaggccgatgctccgtgcctcttcgccgtcgaccatgcgcccggtgtaggccagctcgcgcatcatgccatcgccgatgatccgcggcaggcgctgcagggtgccgacgtcggcggccatgccgatgtcgatctccttgatcgagaactgcgcgtcggcggtcgagtagcgcatgtcgcaggccgagaccaggtcgatggcgccgcccaggcagtagccctggatcgccgcgagcaccggcttgcggcagttgtcgaccgcgttgaacgaggcctgcagctcgagaatcttgcgacgcagggcgtcggcgttgcggccgacgtccttgcccagttggctgccgacctgggccagcagcatcaggtcgatccccgaggaaaaatgcttgcccgccccggacagcacgaccacccgcacttcgtcggtatcgtcgacccagcggaagatctcgatgatctcgcgccagaagtcctggttcatggcattgatcttgtccggacggttgatctggacgtgggcgatcttgtctgccagctccacacggaatgcgttgtactcggtcacggcgatagtcctcggcagagcaactgcgctgtcagaacgcagagatttttgttgtgcggaaaatcccgcaactataacaagggcgagccaaatgtcgatgctgcactatgtgatgcacggcacgcccattgataccgcaatctcttcgatgattgcgctaaacgcttgatccaacgaaagtcctgctggcattttcagtcttttccttgccgtggagtccatcgtgagcagtcccctgagccaggctttcgcacagaacttcctcgggcattcgccgcgctggtacaagctgacggtgctcgccttcctcttgctcaaccccctgctgctatggctggccgggccggtgacaagcgcctgggtgctggtcggcgagttcatcttcaccctggccatggcgctgaaatgctatccgctacagccgggtggcctgttggtgctggaggcgctgctgcttggcctggctacccccgaggcgctctatgcggaattgcagcacaacttcccggtgctcctgctgctgatgttcatggtcgccggcatctacttcatgaaggacctgctgctcctgctgttttcccgcctgctgctcggcgtgcgctcgaagaccctgctatcgctcctgttctgcctgctggccgccctcctctcggccttcctcgacgccctcaccgtgaccgccgtggtgatcagcgtggcggtggcattcttcgccgtgtatcaccgggtcgcttcggggcagcgcgccagcgaggactacgatcccgccaccgaccgccaggtccccgagctgcaccgggcccatctcgaggaattccgcgccttcctccgcagcctgctcatgcacgcggcggtcggcaccgcgctgggcggcgtctgcaccctggtgggagaaccgcagaacctgctgatcggccacgaggccggctggcatttcgtcgagttcttccgccaggtcgcgccggtatccatgccggtactggcggccggcctgctgacctgcgtgctgctggagaagagccgccgcttcggctatggcgcccagttgccggcggcggtgcgccaggtgctcgccgagtacgccgccagcgaaagccgcaaacgcggagcgcagcagaaggccgcgctgctggtgcaggccctggcggcgctggtactgatcgtcgggctggccctgcatgtcgccgaggtcggcctgatcggcctgttggtgatcgtgctgatcactgccttcaccggcgtcaccgacgaacaccagatcggccgcgccttccaggaggccctgccgttcactgcgctgctggtggtgttcttcgcggtggtcgcggtgatccaccagcagcacctgttcaccccgatcatccaggcggtgctggcgctgccggcggaacgccagccgggcatgctgttcatcgccaacggcctgctctcggcgatcagcgacaacgtattcgtcgccaccatctacatcaccgaggtgaaacaggcgctggatgccggccacatgagccgcgagcatttcgataccctggcggtggcgatcaataccggcaccaacctgcccagcgtagcgacgcccaacggccaggcggcgttcctcttcctgctgacctcctccatcgccccgctggtgcgcctgtcgtacggccgcatggtctggatggcgctaccctacaccctggtgatgggcggcctgggctggtgggcggtcagtcattggctttgagcgtcggcactccgttgacctggttgcgccattgccgccaggtgtacatcgggataccggccatcagcaccaggaagccccagaagatcgcctgctggccggtgccatacagcgcccatagcgagtaggcgaagcccagcgagccgatcaccagcaattgccggcgtgaacgcggcgagaactcgtccggtcgcaccgccagcagttgcaacagcgcggcggtgcagaacgcgtaggggaccaccccggtcatggtgccgagcaggatgatcacgttgaacacatcgaccaggtcgccatgcccgtcgaccatcaccagcgccgtcaccagcagccccgaggccagcaggccgtgggccggcgcgccgttcttgttgagctggccgagcgactccgggaacagcccgtcgcgcgccggagccaccgggatctggccctgcaacaggacccagccattgagcgcgcccaggcaggcgatgaccgccccggcagccaccaggtagtagccccagtcgcccatcaggatccgcgccgcgtcggcgaacggcgaggtggagcgggccagcacctccggcggcatcaggccctgcaccgcagtgatcgagaggatgtagagggccgccgcggccagcgtgccgaacagggtcgcacggggaatggtgcggcgcggatcctcgacgtcgtcggccggcacggtggccgactccaggccgatgaacgaccacagggtcagcgccgcggtggtggcgatcgcctgggcatagcccatgttcggcagctcgctgcgcgccgggatcgccaggtgctcgggattgaagtggaaccagccgaggataccgaccagcaacaacggcagcagcttgaggatggtcagcaggttctgcaccacgctgaaggtgccgatgcctcgcaggttgatcagggtgcacagccagatcgcggcgatggccacgctgaccatcagcagcggatccgccagcgccgggatgaatacccgcaggtagccgaccagggtcacggcgatcgccgcgttgccgatccaggcggctttccagtaggtccaggcgcacaggtagccggcgaagctgccgaaaccgtcgcgggtataggcgtaggggccgccggcgccggggttgacccgcgccaggcgggcgaaggtcagcgccagcagcaccgcgccggtgctcgacaccagccagccgaacaggctgagcccgccgaacgccgccaggctggagggaagcaggaagactcccgaaccgaccatgttgccgatcaccagcgcgctgcaggtccagaaccccatgccgcgcttgccggccttctctccccccgccatcgacaccccttagcctgtcggcttcattcctttatgcattcaacggtatagcagcgcccggacggtccgtcctgatgctgcaggccatgcacatcggagtcgaaaccagggaaggcgcgctcgaaggtccgcgcgaactcgagatagtcgaggatcgagcgggtcgcctcggtgaagcgctcacccggcatgatcagcgggatacccggcggatagggtaccagcatgacggccgcgatgcgcccttccaaccgagcgatcggtaccgcctcgacctcgccgcgcaccagcttgtcgtaggcctcggacggccgcatcgcgacctccggcagcaccgtgtacatgcgcttcatggccttcgccgtggcgttgtcgcggtagctggcgtgcatggcgtcgctgaggtcgcgcaggcccacgccgttgtagcgcttgccgccggcctgggccacggagggcaagacgtcgagcagcggcaggttggcgtcgtaacagcgcttgaattcgagcagttcggtgaccagggtgctccacttgcccttggtgatgcccatcgagaacagcaccaggaaggagtagagaccggttttctccaccaccagcccgcgctcccagaggaagcggctgacgatggcagccggaatcccctgctcgctgagcttgccgccggcgctcaagcccggggtggtcagggtgaccttgatcggatcgagcagcacgtagtcttcggcgatatcgccgaagccgtgccagtcggcgctcggctccagcacccagtcatgggtgccgacctgatcggtgccctccacctgctccggctgccagacgccgaaccaccagtcgttccggtccaggttctgccgtacgttggccagggcccggcggaagctgagggcctcgtcgaaggtctcctggatcagcgaacgcccggcgggcccttccatcatcgccgaagccacgtccagcgaagcgatgatgccgtactgcggcgaggtcgagatgtgcatcatgaaggcttcgttgaagcgcgccacgtccagcttccgggtcccgccatcctgcacgtggatcatcgaggcctggctgaaggcggcgagcatcttgtgcgtggagtgggtggcgaacaccagggggccctcctcgctgcgcgaggtgcccatgccatagcgtccgtcgtagaactcgtggaacgcggcataggcgtaccaagcctcgtcgaagtgcaacacctcgacgctgtcgccgagggtctgcttgatcagctcggcgttgtagcacaggccgtcgtaggtggagttggtcaccaccgccagcttcaccttcggctcgcggccgcgcgccagcgggctggcggcgatcttcgcggcgatcgactccttgctgaattcgctcagcgggatcggcccgatgatccccagttcgttgcgttccggagtcaggtagagcggtatcgccccggtcatgatgatcgagtggaggatcgacttgtggcagttgcggtccaccagcaccaggtcttcgcgaccgaccatggagtgccagacgatcttgttcgcggtggaagtgccattgatcacgaagaaggtatggtcggcgccgaaattgcgcgcggcacggtcctcggcctcggccagggggccggtatggtcgagcagcgagcccagctcggggaccgagaccgacaggtcggaacgcagcgtgttctccccgaagaactggtggaacgcctgtcccaccggactcttgcgataggcgacaccgccgccgtggcccggcgtatgccaggaatagttggactgcgcggtgtgctcgaccagcgcacggaagaatggcggcagcagcccggccaggtagttgcgcgccgcccgggcgacctggcgggcgaggaacggcacggtgtcttcgaacaggtagaggatgccgcgcaactggtgcaggtcggccatggactcggccggcgcgttctcgatggtcacctgctcgccgagggcgaagatcggcaattgcggcgcccgcacgcgggccacgcggatcagttcgaccacatcctgcagcaggcgctggttttccccggcaccttcggcggcgaccaggatgcaggccaggccgtggtgggtggaagcgacgatgcgcccctcggcggagctggcggtggagagaatgctgaagccgtcctgctccagttcgtgggcgatgccccgcacgcgttcgccggcaacggtgtcggccttgatgtcgcgatggacgatgaggacgggaaatttgaggtctttatacattgttgatcccgagcagcaggcgggcgaaccccgccggtcggctcagggtagagacttgccggcacgcgcgtaacccccggcggcttgcccttgtaagaaaaggtcgcggcaacacaagtcggcgcgccgcgcttgcctcctctcccgccagcgaggagcatggacctctctgccctgctacggagcgacaacgatgcgcagcgcttatcggatcgtcagcgatcactatgcggcctctagccgtgggaacctcgccggaatgctggcggacatggacgaacgcaccgaatggacggaaatggccggtttcccgctggccggcacctatgtcggcgcggccgccatcggcgccggtgtgttccaggccttgcagcgggactgggagggcttcagggtcgagatcgagcgcctgatcgacggcggcgacagcgtggtcgccgtcggtcgatatgcagcgacccaccgtcgcagcggcaagtcgttcgaagcgcgtgtggcacacgtatggacggtagaggacggcaggatccgccgtttcgagcagttctgcgacaccttgctggtggaccgggcgacacgctgaacgcggcgcccgtggtgcatgggcaggctattcgccgaccggcgcctccagttgcgcccagagtgacggaccacctgccgacttctcgatcaccgccagccgcgccgcatgcgcagccagctcttcggcgttggcgcgcagcaccggggtggcgacccgcgccggatcgagccgacggatcgggctgaccatcggccggccgctgccgtcgccttccgcgccgctgccggccagcgacaggctggtctggccgccggtcatcgccaggtagacgtcggcgaggatctcggcgtcgagcaacgcgccgtgcaggtcgcgaccggagttgtccacgccgtagcgcttgcacaacgcatcgaggttgttgcgctggcccggatggcgctcgcgggccatcagcagggtatccagcaccgagcagtactcggtcacgtccgagcggtcctgctggcccagcagggcgaactcgttgttgatgaagccgatatcgaacgccgcgttgtggatgatcaactgggcgccgcggatgaattcgaagaaatcgttggcgacctcgcggaagcgcggcttgtccttcaggtattcgttggtgatgccgtggacggcgatcgccccttcgtcgacctcgcgatcgggttgcaggtagacgtggaagtggcgaccggtcaggcggcgcccctccagctcgacacagccgatctcgatgatccggtgaccatcggtcaccggcatgccggtggtttcggtatccagtacgacgctacgcatctatagagcctttctctgtttcgctgcagccgcggctgctgaacgcttgtttcggtgtggccgctcagcgcggcaattcggcgacgccacggttggccaactggtcggcccgctcgttgccgggatcgccggtatgcccgcggacccactgccactccacctggtgccgggcgacctgctcatccagggcctgccagaggtcggcattcttgaccggctgcttgctggcggtcttccagccgcgcttcttccagttcggcaaccattcggtgatgccgcgcatcacgtattccgagtcggtgatcagacggatcggacaggaacgcttgagtgccgccagcgcctggatcgccgccatcagctccatgcggttgttggtggtgtccggctcgccgccccaaagctctcgctcggcgcccttgtagaggagcaacgccccccagccgccgcgcccagggttgcccttgcaggcgccgtcggtatagatcactacctgttctttatctgtcatgcctaaatttcggaatctcgccggctgactttcgccaccggcatgggcaccagctgaccgcgcggttcgcgcttgctctggcgcaacgggcgcaaccccacgaccagcttgcgtgccaccaatagatagaagccggcgcccgaagactgccaggcgtcgccccagcgctccaggcgagccaggcgcgattgccaggctgccgacgcaagcggcggacgatagcacccgaagcgccgtttctccagcgcgaagcccagcaggttgagccagtcgcaggcccgcgacggaggaatgcagcgggcctggcgcaaggcatccccggcgaaataatgacggatgccccacaggctccatgggttgatgccgatcagcagcaggtggccgcccggacgaacggtacgcgcggcttcgcgcaggagacggtgaggcgacaggcagaaatccaggccgtgttgcagcaggaccacgtccgcggcatgttcgctgagcggccaggcgccctcttcgcaggcgatgtccacgcccggcagcggcggccccaggcgcacgccgcgctgaatctgcccggtgctcggcggcagttcggcatgcggcccgtagtgcaccaggtagccaccgaagtaacgggtcagctcgtcgcacaacaggcgtcgctcctcggccagcatcaggctgcccagcgggccctggaaccagtcgcgcgcccggttgatcgatgccagccactcggcatcggtctgggcgaaggcttgcggttcgttcatgcgtacctccagcgtcttccccttcgcggcgacggacgccggcacgacgggaaaataagcaatactatgcgccaatgacttctgcttagcgacatcgacccatgatacagatcgacgccctgcccgccttcaacgacaactacatctggctgttgcaagatgcgacaagccgtcgctgcgcggtggtcgaccccggcgatgccaagccggtggaagcctggctggccgcccatcccgactggcggttgagcgatatcctggtgacccaccaccatcacgaccacgtcggcggcgtcgcggccctgaaggaactgaccggcgcgcgggttctcggcccggccaacgagaagatcccggcccgcgacctggcgctggaagacggcgaacgggtcgaggtgctcggcctggtcttcgagatcttccacgtgcccggccataccctcggccatatcgcctactaccacccggcggagacgccgctgctgttctgcggcgacaccctgttcgccgccggctgcggccgtctcttcgaaggcaccccggcgcagatgcatcattccctggcgcgactggccgcgctgccggccaacacccgggtctactgcacccacgagtacacgctgagcaacctgcgcttcgcgctggcggtggagcccgacaacgcggcgctgcgggaacgcttcgaggaagcgacccggctgcgcgaacgggaccgcatcaccctgccgtcggaaatctcgctggaattgtcgaccaatccatttcttcgcgtttcggaaaattctgttaagaaaaaagccgaccagcggagcggccagcaaaaccgcaccccggaggaggttttcgccgtcctgagggcctggaaggaccagttctgaaggttggcgaaatcttgaccactcttgaggtcatttctagaatcggctgaatttttgcccggaacagcactcagccgatgccgccacagacacgtaaaacccccgatctagacgccctggctcgcgccgttcgggtgtccatcctgctcatcgccggtgcgctcgccggctgccagggcagcggccagatcaagggggaggcccaggccaaagcagcacgtcccggcgcccgagccgtcgacgtccagttcaacccctcctggctgcatacccagcccggccagaacgccgcctacaacgacatctgggaccgcatgcgcgacggtttccagctccaggatgcgatcagcaccaacccgcgcatcgaacgccagcgcctctggttcctcagcaaccagtcgttcctcgaacaatcgagcgcgcgcggcagcctctacatgcactacgtggtcgagcgcctggaagaacgcaacatgccgctcgaactggcgctgctgccggtcatcgaaagcgcctataaccccttcgccctgtcgcgcagcaacgccgccggcctctggcagttcattcccgccaccggccagcatttcaacctgcgccagaccaatttctacgacggtcgccgcgacatcaccgcctcgaccaatgccgccctgacctatctcgagcgcctgcacgacatgttcaacggcgactggatgctcgccctggcggcctacaacgccggcgaaggcactgtcagccgcgccatcgaacgcaacgagaaactgggcctgccgaccgactactggaacctgccgctgccgcaggaaacccaggactacgtacccaagctgctcgccctctcacagatcgtcatggcgccggattcctacggcatcagcctgaacccgatcaacaacgagccctacttccaggccgtccgggtcaagcgcgggatcgacctgtccagcgtcgccgcgctggcgaacctggacgaggacgagctgtaccagcttaacccggcctacaagcgccgcgtgaccatggacggcccccagcaactgttggtgccgatggagaaagcggcgttcctgaccgcctcgctggacaccctcaagccgaaggaagtcaccgcctggcagcaataccgggtgcgtagcggcgacagcctgcacagcatcgccaaccgctatcggatcaccgtagcggagctcaagagcgccaaccgcctgtccagcaaccacctgcgcaagggccagcaactgagcatccccgggcagatcgccggcggcgccgtcaagccggtctaccagcaactcgcccgacaggcttccaccccgtccaggacccgctcctataaggtcaagaacggcgacagcctgtggcagatcgcccgcaacaacggcgtcgacgtcaacgacctgaagcgctggaacggcctggacaagcacgccctgaaggtcggccagaccctcaagctgcaaggcggcacccaggccctggcggcccgcaagggaaacgccgccggcaagcgcgacagcgccacctactacaaggtcaagcaaggcgactcgatgtacctgatcgccaagcgcttcaatgtcgaaatgaagcacctgcagcgctggaacccgcgcagcaagcaggcgctcaagcccggccagaccctgaccctgtacctggacaccgcgagccgctgacagcccattgcaggccgtcccgaaacgccacgcccgctcctgccggcgtggcgttttcgcaagcgcggccagaaccccggaccctaggccggacaggcccgcgctccctcttttttcctgtgcgggcaaggtgttactgttgcctgacgattcgttgtcaaaaatagccaaggacccggacacacgcctgatgcgtcgcctctccttcctgatcctcggcctggccgtgagcctgcccagcttcgccgcgattacccagagccatggttatgcccaattcggcacgctcaagtatccggccaatttccagcacttcgactggaccaatcccgacgcccccaaaggcggcaccttgcgcctgatggcctcgggcagcttcgacacgctcaacccctacaccctgaaaggcaccagcccgatcggcaccggcgatttcctccagtacggagtcaacgagctgaacgaaccattgatggtgggcaccggcctgtacgacccgtccggcgacgaaccagcctccagctatggcctgatcgcgaagagcgtggaatacgcggaaaaccgcagctgggtggtattcaacctgcggccggaagcgcgcttccacgacggcaggccgatcaccgccagcgacgtggccttttcctatcgcaccctggtcaagcaggggcacccgatgtaccgcacctacctgcaggaggtgaagcgggtcgatatcctcaccccccaccgggtgcgtttcgtcctgcggcgctccggcaacccgctgctgatcctgcgcctgggcgagcttccggtgctgccgcagcattactggaaggatcgcgacttccgcgccaccaccttcaccgcgccgctgggcagcggtccctatcgcatcgtcgaggtcgatcccgggcgccgcctggtgttcgaacgcgtgaagggctggtggggcgaaaaactgccggtgaaccgcggcaaatacaatttcgaccgggtcgtggtggacttctaccgggacaacggcgtcgccttcgaagccttcaaggccggcgagttcgacttctacatcgagcaccaggcgaagaactggctgaacaactatcgcttccccgcggttctgcgcggcgatgtgatccgcacggaaatcccgcaccagatccccagccagacccaggcgttgttcatgaacacccgtcgcgccgtgttcaaggagcgcgcgctacgccaggcgctgggcgagatgttcgacttcgaatggaccaatcgcgccctcttcagcaattcctacctgcgctcgcgcagctactacccgaacagcgaattcgccgccagcggcgtcccggagggccaggaatggctgtacctgtcgccgtaccgcaagcaattgccggcgcagttgttcaaacagccgttcagcctgccgaccaccgaggggcgcggcattccccgtgaaaccctcaggcatgcactcggtctactggccgatgccggctggaagctgtccggcgaccgactgctgaataaaaagggcgaaccgctgcgcttcgaaatcctgctggtcaatccgagcctggagcgtattctccagccctatcgcgaaaacctcgccagcatcggcatcgacgcgcgcctgcgcaccgtcgaccgcgcccaatacaagcagcgcctggaccagttcgactacgacatgatcctcatgaccctgccgcagaccctcagtcccggcctggaacagtggcagtacttccactccagccaggtgaaggtcaagggcagcaagaattacgcgggcatcgccaacccggtggtcgacgccatgctcaaccgcctgctcggcgcccacagccgcgacgaacaggtcgccgccgcgcgcgccctggaccggaccttgctctggcagtactacagcattcccaactggtacctcaattcgcaccgtctggcgtaccgcaaccgcttcgccttcgtcgccaccccgccctacaccctgggcctgcgcgcgtggtggcagaaaaacctggagacgtcccgatgatccgtccccgcttcacccctctgctggcagccctgctgctcggctgctgcggcccgctcctcgccgccccgaaacatgcactgacgctctacgatgagcctccgaagtatcccgccgatttcaagcatttcgactacgtgaatccggatgcgccaaaaggcggcatcctccgccaggccgacttcggcggcttcgacagcctcaacccgttcatcggcaagggcgtctcggccccttcgctgggcctgatctacgacaccctggccttccagtcgcaggacgagccgttcaccgaatacggcctgctcgcggagaagatcgagaaggcaccggacaacagctacgtgcgcttctacctgcgcccccaggcccgtttcagcgatggcacgccggtcaccgccgaagacgtggtgttcaccttcgagacgctggtgagcaagggcgacccgatgtaccgcaactactatgcggacgtcgacaaggtggtcgccgaggacaagcttcgcgtgcgcttcgacttcaagcacgccggcaaccgcgaactgccgctgatcctcgggcagatcgcgatcctgccgaaacactggtgggccgaccgcgacttttccaagaccggcatggaaatcccggtaggcagcggtccctaccgcatcgccaaggtcgatccgggacgctccatcagctacgagcgagtcaaggactggtgggccaaggaccttccggtctcccgcggactctataacttcgacaccatcaccatcgactcctatcgcgacatgtcggtcgccctggaagccttcaaggccggccagtacgacgtcaacctcgaatattcggcgaaggactgggccaccggctacgagtcgccggcattgcgcgacgggcgcttcatcaaggccagcatccacaaccacaacccggtggggatgcagggcttcgccttcaatatccgccgcccggtgttccaggaccgccgggtacgccaggcgatcagcctgctgttcgacttcgaatggtcgaacaagcagctgttcttcagctcctacaagcgcaccaacagctatttcgagaactcggagatggccgcccaccagttgcccagcgaagccgagctgaagatcctcgaaccgctgcgcggcaagattcccgacgaggccttcgaccaggtcttccagaatccggtcaatgacggcagcggggtgatccgcgagcagcggcgcaaggcctaccagttgctcaccgaggccggctacaggatcgagaacaaccgcatggtaggtcccgacggccagccactgagcttcgagttcatgctgttccaggccaacatggaacgggtcatcctgccgttcaagcgcaacctggccgaacttggcatcgacatgcagatccgtcgcgtcgacgtctcgcagttcgtcaaccgcctgcgctcgcgggatttcgacatgacctcggcgacctggccgcaatccaactcgccaggcaacgaacagcgagagttctggcattccagcagcgccgacaaggccggcagccgcaacttcatcggcctcaaggacccggccatcgacagcctggtggaaagcctgatccagtccgactcgcggcaaagcctgatcgaccatacccgcgccctcgaccgcgtactgtcgtggggctactacgtggttcccaactactacgtcgatacctggcgggtcgcctactggaaccgtttcggccggccgaaggtgacgccactctacgactggggcctgatgacctggtggcagaccagcgacaaggcgctgccgagcaaggcgcaagccgaagccacgcaagacgccgagccggaacgggagtaacgccgcatgctctcctatatcctgcggcgcctgctgctgatcgtccctaccctgttcggcatcctgctgatcaacttcatcatcatccaggccgctcccggcggtccggtggagcagatgatcgccaagctggaaggcttcgacgccgcttccggcggcgccaccgggcgcatctccggcggcggcggcgaagtcgccgtggccggctcgcaataccgcggcgcgcaaggcctggacccggagctggtgaaagagatcgagcgcatgtacggcttcgacaagtcggcccccgagcgcttcatgatcatgctgaagaactacctgcacctggacttcgggcagagcttcttccgcgacgccaaggtcaccgacctgatcatcgagaaattgccggtgtcgatctcgctcgggctctggagcacgctgatcatgtacctggtgtcgatcccgctggggatcgccaaggcggtccgccatggcagcgtcttcgacatctggaccagctcggcgatcatcgtcggctacgccattcccgccttcctcttcgccatcctgctggtggtgctgttcgccggcggcagctactgggactggttccccctgcgcggcctgacctcgaacaacttcgaccagctcagcctcggcggcaaggtactcgactatttctggcacctggccttgccggtaaccgccctggtgatcggcaacttcgccaccatcacgctgctgaccaagaacagcttcctcgacgagatcggcaagcaatacgtggtcaccgcccgcgccaagggcctgaccgaacgccgcgtgctctacgggcacgtattccgcaacgccatgctgctggtgattgccggcctgccggctgcgctgctagggatcttcttcaccggttcgctgttgatcgaggtgatcttctccctcgacggcctcggcctgctcagcttcgaagcggcgatgaaccgcgactacccggtggtcttcggcacgctgttcatcttcaccctgttcgggctggtcatgaagctgatcagcgatatcgtctacaccctggtcgatccgcgcatcgacttcgagaaccgggagtaatccgatgcgcctgtctcccatcaaccagcgccgctgggcccgcttcaagagcaacaagcgtggctggtggtcgctctggctgttcctcatcctgttcgtcggcagcctcggcgccgaactgatcgccaacgacaaaccgctggtcgtgcattacgacggcggctggtatttcccggtcttcaaacgctacccggaaaccaccttcggcggcgaattccccctggaagccaactacaagagcccctacatcagccaactgatcgccgagaaggacggctgggtgctttggccgccgatcccctacagctacgacaccatcaactacgagctgaaggttcccgcccccgccccgccgtcggcggaaaactggctgggcaccgacgaccaggcccgcgacgtgctcgcccgggtgatctacggcttccgcgtgtcgatcctcttcgccctgaccctgaccgtgctcagttctctgatcggcgtcaccgtcggcgccctgcaaggctactacggcggctgggtcgacctgctcggccagcgtttcctggaagtctggtcggggctgccggtgctctacctgctgatcatcctggccagcttcgtccagccgaacttctggtggctgctgggcatcatgctgctgttttcctggatgagcctggtggacgtggtccgcgccgagttcctccgcgggcgcaacctggaatacgtccgcgccgcccgggccctcggcatgcgcaacagcgccatcatgttccgtcacatcctgccgaacgcgatgatctcgaccctgaccttcatgccgttcatcctcaccggcgccatcggcaccctcacctccctggacttcctcggcttcggcctgccgcccggcgcgccgtcgctgggcgagttggtcgcccagggcaagtccaacctccaggcaccctggctgggcatttccgccttcgtggtgctggcggtcatgctgagcctgctggtgttcatcggcgaagccgcccgcgacgctttcgacccgaggaaatgagatgagcgagaacattctggaaatccgcgacctcgccgtcgaattcctctccggcgagcaacgccagcgggtggtcgaaggtgtcagcttcgacatccgccagggcgagaccctggccctggtcggcgaaagcggctcgggcaagtcggtgaccgcccactcgatcctgcgcctgctgccctactccgtcgccagccacccagcaggcagcatccactaccagggcgaggatctgctcaagctcccggaacggcgcctgcgcgggatccgcggcaaccgcatcgccatggtcttccaggaacccatgacctcgctcaatccgctgcataccatcgagaagcagctcgccgaggtcctcgccctgcacaagggcctgggtggcgccaaggccagcgcgagaattctcgaactgctcgagctggtcggcatccccgagccagccaagcgcctgaaagcctatccacacgaactctccggcggccagcggcagcgggtgatgatcgccatggccctggcctgcgagccgcaactgctgatcgccgacgaaccgaccaccgcgctcgacgtcaccgtccagttgaagatcctcgatctgctcaaggacctgcaggcacgcctgggcatgtccctgctgctgatcacccacgacctcaacctggtccggcgcatcgcccaccgcgtctgcgtcatgcaacaagggcggatcgtcgagcaggcttcctgccaggaactcttcgcagccccgcgacacccctatacccgcgagctgctcaacgccgagcccagcggtgcgccggcaagcaacccgcccggtgaaaccctgttggcggtggacgacctgcgggtctggttcccgatccgcaaaggcgtgttccgccgcaccgtggaccacgtcaaggcggtcgacggggtcaatttcgaactaccccgcgggcagacgctgggcatcgttggcgaaagcggctcgggcaagtcgacccttggcctggcaatcctgcggctgctggaaagccagggcggcatccgcttcgaaggcacccggctggacggtctcgcgcaacatgacgtgcgcccgctgcgccgcgagatgcaggtggtgttccaggacccgtatggcagcctcagcccacgcatgtgtgtcggcgagatcgtcggcgaaggcctgcgcatccataggatcggcagcgaggccgaacaggagcaggcgatcatcgacgcgctggtggaggtcgggctcgatccgcagacccgctaccgttacccccacgaattctccggcggccagcgccagcgcatcgccatcgcccgggcactggtgctgaaaccggcactgatcctgctcgacgaaccgacctcggcgctcgaccgcaccgtgcagcgccaggtcgtggaattgctgcggcaactgcagggcaagtacaacctcacctacctgttcatcagccacgacctggcggtggtcaaggcgctcagccaccagttgatggtggttcgacatggcaaggtggtggaacagggcagcgccgaagcggttttcgcctcgccgcaacatccctatacgcagcaattgctggaggctgccttcatggccccggcaagcgcggaaaactgagtagcagacaaggaacggaccatgggatttctcacaggaaaacgcgccctgatcgtcggagtcgccagcaagctctccatcgcttccggcatcgccgccgccatgcaccgggaaggcgccgaactggccttcacctaccagaacgacaagctcaggggccgggtggaggagttcgccagtggctggggctcgcggccggagctgtgcttcccctgtgacgtggccgacgacagccagatcgaagcggtgttcgccgccctgggcaagcactgggacggcctggacatcatcgtccactccgtcggattcgctccaggcgatcagctcgacggcgacttcaccgcggtgaccacccgcgagggcttccgcatcgcccacgacatcagcgcctacagcttcatcgccctggccaaggccggacgggaaatgatgaagggccgcaacggcagcctgctgaccctctcctacctgggcgccgaacggaccatgccgaactacaacgtaatgggcatggccaaggccagcctggaggccggggtccgctacctggccggcagcctgggcgcggaaggcacccgggtcaatgcggtttccgccgggccgatccgaacgctcgccgcctccgggatcaagagtttccgcaaaatgctggccgccaacgagcggcagacgccgctgcggcgcaacgtcaccatcgaggaagtcggcaatgccggcgccttcctctgttcggacctggccagcggtatcagtggcgagatcctctacgtcgatggcggcttcaacactaccgccatgggcccgctggacgacgactgatcaccccgcccatgaaaaatggccgcttcgagcggccatttttcatgggaggaataaagaaaaggccgcgtaagcggccttttctctgcatctcggtctcagtatttctcgacttccgccttgtcctgcaactgacggcggaaggcggcgaagtctgcctgtccgctgcgcgaagccaggaagcggcggtacatggccttctcgtcgtcggagatagcctcctccggctcgctgacgccattcaggcggatcaccacgtaatcgccattggccagggtcacgccagagaacgaaggcttgtccttggcctccggacgctgcatgcggaacaccgcctggagcagtttcggatcgacgccttcgtggccgcgggaggccgcctcgaccactttccacgactcacccgctgcggaagaggtacggccttcacgcagctctgcgatcagggcctcgccacgcttctgcgcctcctcggcggccttttcggcggccaggcgctcgcggatgttcgccgcgacctgctccagcggttgctccttcggcttgttgtgttccttgacccgcagcaccaccacggtgtccggatccagctcgatggcgccactgttggcggcttcttccagcacctcggcgctgaacgcggtctgcacgatctggcggttggcagcgatgccgtcgccccccgaacgtccgaacggctggctggtctggaccttcaggcccatttcctgcgccggctggctcaggtcggcggcttcgtaggcggagctttccaggtccttggtagcctcgacgaagcgctgctcgaccatctgtttcttcagttcgtcctcgagcttcggcttgaggctttccaggctcggtacttccggcgcctgcacgcccagcagcttgatcaggtggtagccgtacggagtcttcaccggggcggatacctcaccttgcttcagcgcatacagcgcctcctcgaacgcggggtcgtacacgccgcgaccggcgtagcccaggtcaccgccggtggcggccgagccgatatcctgggagaactccttggccagcgcggcgaaatcctcgcccttggccaggcgagccttgatctcgtcgatcttcgccttggcctgctcgtcgccgaccttgtcgttcacctcgatcaggatgtgtgcggcatcgcgctgctcggaaaggttggcgatttccttctggtacagcgcctcgaggtcttcctgcttcaccttgacctggtcgaagaaggaggacttcttcagctccacgtattcgacgaccacctgctcgggagtcatgaactcgctcttgtggccttcgtagaaggccttcacctcgtcgtcgctcacgctgctcttggaggcgtcggccttgatcgccagggtggcgaagtcgcgggtctgcttctcgaggcgagcgaaggactgcaattcgttgtcggtgacgaaaccggtgcccgccaggccggcgcgaagctggccgatgagcatttcctggccgagcatctggcggaactgcatgcggctgtagttcatctggcggatgacctggtcgaagcgatccgcgttgaacttgccgtcgacctggaactcgggagtttgcaggatcaactggtccagcgcctggtcggagaaggcgaacttgtcgtccttggcggcctggagcagcagggtacgctcgatcagccccttcagggccgcttccttgagcagcttgtcatccagcatggatggatcgaaatccttgcccaggcgttgcagcagctggcgacgctgcatgtccacggcctgttggacttcattgagactgatatcgtcgccgttgaccttggcggccacgttggagtggtcggtggcccggatgatcgcgtcgaagccggtcagcgacaggagaacgatgatcacgccaatgatggtcttggcgatccagccctgggaattatccctgatgttctgcagcatgcagcccccaaaaactgccacgaccagccgtcttgggcggcgcggcgtgggtaagagatgcggatataagaaaggcgcatccgaggatgcgccttctcgtaactggcggagcggacgggactcgaacccgcgacccccggcgtgacaggccggtattctaaccgactgaactaccgctccgcagccaggccagccttggccgacctgggtagatcgagtccaaaaagacgcttagttgacagcatccttcagggctttaccggctttgaagcccgggatcttggcagcggcgatcttgatcggcttgccagtttgcgggttgcgaccggtgcgagcagcgcgctctttgacagcgaaggtgccgaaaccaaccagcacgacggagtcaccagccttcagggcgccagtgacggactcgatcactgcgtccagtgcgcgaccggcaacagctttcgggatatcagcagatgcggcaattgcatcgatcagttccgacttgttcactctaagtccccttatttctgttgagtatgtttctatgtgttaggtgtaaggaaattctgcgctggtaggccaactgactcagcaagtgccgctttataacaagggcccaaaaacagtgtcaagaatacctaccgactaatgcgtgctaattcgctccttggaatcaggctcgcgtttttcatcctttgcaaccatctccggagccgcatcgggcaagggctccggggcgtattgcagcgcaatttgcaggacttcgtcaatccatttaaccggtttaataaccagatcactcttaatattgtccggaatttccttcaggtcgcgaacattttcctcgggaatgatcaccgtcttgatcccgccgcggtgcgccgccaaaagtttttctttcagcccgccgatcgccagcacctgcccacgcagggtgatctccccggtcattgccacgtcggcgcgcaccgggatctgcgtgatcgccgaaaccagcgccgtgcacatgccgatgcctgcgctcgggccatccttcggcgtagcgccttccggaacgtggatatggatgtcacgcttctcgtggaagtccgccgcgattcctaggctctgggcgcggctgcgcaccacggtcaacgccgcggtgatcgattccgccatcacgtcgcccagcgatccggtcttggtcaactggcccttgccgggtaccacggccgcctcgatggtaagcagctcgccgccgacctgggtccaggccagcccggtcacctggccgatctggtcctgctgttcggcgaggccataacggaacttgcgcacgccgaggtagttctccagcgtctcgctggacaccaccgcctggatacgcttgagcttggcatgctccttcaccgccttgcggcagaccttggcgatctgccgctcgaggctgcgcaccccggcttcgcgggtgtagtagcgaatgatgtcgcgcagggcgccttcctcgaaggtcagctcgcccttcttcaggccgttggcctggacctgcttcggaatcaggtacttggcggcgatattgaccttctcgtcctcggtgtagcccggcaggcggatgacttccatccgatccagcaggggcgccgggatgttcatcgagttcgcggtgcagaggaacatcacgtcggacaggtcgtagtcgacttccaggtagtgatcgttgaagttgtggttctgctccgggtcgagcacctcgagcagcgccgaggcgggatccccgcgcatgtcgctgcccatcttgtcgatttcgtcgaggaggaacagcgggttgcgcacgccgaccttggtcatcttctggatcaggcggcccggcatggagccgatataggtacgacggtgaccgcggatctcggcctcgtcacgcacgccgccgagcgccatgcgcacgaacttgcgattggtggcgcgggcgatggattcggccagggaggtcttgcccacgccgggcggtcccaccaggcaaaggaccgggcccttgagcttcttcacccgcttttgcacggcgagatactcgagaatgcgctccttgacctcttccaggccataatggtcggcatcgaggatgtcttccgccttggcgagatcatggcgcaccttgctctcggccttccacggcacgttcagcagccagtctatgtaggaacgcaccacggtggcttccgccgacatcggcgacatctgcttgagcttgttcagctcggcagtggccttggtgtgcgcctccttggtcaggccggcagcgtcgatgcgcttcttcagctcctcgacttcgttgtgcccttcgtcgatatcgccgagttccttctgaatggccttcatctgctcattcaggtagtactcgcgctggctgcgctccatctgcttcttgacccggccgcggatacgcttttccacctgcagcaggtcgatctcggcatccagcagcgccaggacatgctcgacccgcgacgacaggtcggtgatctccaggatgtcctgcttctgctcgatcttcagcgccatgtgcgcggccatggtatcgaccagcctgctcggctcgtcgatgctgttcagcgaggaaagcacctcggcggggactttcttgcccaactggacgtattgctcgaactggctcagcaggctgcgagtgaagacctcggcctcgcgctcgccgacattggcgtcgtcgatggcctggaccgcggcacgaatgtgcccttcttcctcgatgaagcgctcgacctggccgcgctgctcgccttcgaccagcaccttgacggtgccatccggcagcttgagcaactgcagcacggtagcgaccgtacccatgcggtacaggccatcttcgcccggatcatcgtccgcggggtttttctgcgccagcaggaggatttgcttgtcgccggtcatcgctgcctccagggcctcgatggacttttcccgaccgacgaacaacgggatgaccatgtgcgggtaaaccaccacgtcacgtagcggcagcaagggcaattcgacgagtgttttcataatgtcggctctacagcggcacttggccacgaaacagataggaagacctttcagcctaagatggggttaggcccgggaaaaaacaagcgtgccagtcggaaaagaaaaggggcccgaaggcccctgctctttcatgcctcaggcgcagccttggctggcttttcgctgttctcgtagatcatcaggggttgcgacgagccatcgatgacactctcatcgatgaccaccttgctgacatcctgctgggagggaatctcgtacatggtatcgagaaggataccttcgagaattgaacgcaagccacgtgcaccggtcttgcgttcgagcgccttgcgggcaaccgccttgagtgcgtccggacggaattcgagatcgacgccttccatttcgaacagcttggcgtactgcttggtgagagcgttcttcggctcggtcaggatctgcatgagcgcagcctcgtcgagctcatcaagagtcgcgatcaccggcaaacgccctacaaactcgggaataagaccgaacttgacgagatcttccggttcgacttccttgaacgcctcgccgaccttcttgcccatctcctgactgcgcacttcggcattgaaaccgatgccgccgcgcgcggaacggttctggatgacccgctccagaccggcgaaagcgccgccgcagatgaacaggatgttgcgcgtatcgacctgcaggaactcctgctgcggatgcttgcgaccgccctgcggcggtaccgaggcaacggtgccctcgatgagcttcagcagggcctgctgcacaccctcgccggaaacgtcgcgagtgatggaggggttgtccgatttccgggagatcttgtcgatctcgtcgatgtagacgatgcccatctgggccttctccacatcgtaatcgcacttctgcaagagcttctggatgatgttctcgacatcctcgcccacgtagcccgcttccgtcagcgtggtcgcatcggcgatagtgaacggcacgttcagcagacgtgcgagggtctcggccagcagggtcttgcccgagccggttgggccgatcatcagaatgttgctcttgccgagctcgatatcgtccttcttgtcacgctggttgaggcgcttgtagtggttgtataccgctaccgccagaaccttcttggcccgctcctgcccgatcacgtactgatcgaggatggtgcggatctctttcggcgccggaagtttgtgcccactactttccgcctgcgcttcctgcacctcctcgcggatgatgtcattgcacaggtcgacacactcgtcgcagataaagaccgaggggccggcaatcaacttgcgcacttcgtgctggctcttgccgcagaaggagcaatacagcagcttgccgttgtcctcgccgttgcgggtatcagtcattcgatcgatccaatgggtagcttcaaacacaagatgaaggcaattgtgggcattttcaagcccacgaggcggccgaatgtctcgaccgccagtattgcggagccttagacggccaggtcgcgctgggtcatgaccttgtcgatcaggccatacttgacggcttcgtcaccgctcatgaagcggtcacgatcggtatcgcgggcaatgacgtccaggggctggccggtgtggtgcgccaggatctggttcagacgctccttgatgaagaggatttccttggcatggatctcgatatccgaggcctggccctggaaaccgcccagcggctggtggatcatcatccgcgaatgcggcaggcagtagcgcttgccggcggcaccgcccgcaagcagcagggcacccatgctgcacgcctggccgatacaggtggtcgagacgttgggcttgatgaactgcatggtgtcgtagatggacatcccggcagtcaccgagccacccggcgagttgatgtagagatgaatgtccttctcgggattttcagcctccaggaacagcaactgggcaaccaccaggttggccatgtagtcctcgacctggccgaccaggaagatgatccgctccttcagcaggcgcgaatagatgtcgtaggctcgctcgccgcgggcggactgctccaccaccatgggcaccaggccaccggcggcctggatatcgggaacgtgcggaataaaagagttgcgagacatgtcttgcgatcactccctaacagatagtgaagcctcaaagacgcacaagccagcactaaggctggcttgtgggattcgaacgagaggaacgaatcaggccgcttgcggagcttcggccggcttgaccgcttcttcgtaggatacctgcttatcggtcacagtggccttttgcaggacagtatctacgacttgttcttccagtacaacagaacggacttcgttcagctggggctcgttcttgaagtaccaggcgacaacctgctcgggctcctggtaggccgaggccatttcctcgatcatttcgcgaacgcgaccttcgtcggccttcagctcatgctgcttgaccacttcggcgacgatcaggcccagcaccacacggcgcttggcctgctcttcgaacagctcggccggcagttggtcaggcttgatgttgccaccgaactgctggacggcctgcacgcgcagacggttcacttcgttgccgatcagggccttgggcacttcgatcgggttggcctgcagcagaccttccatgacctggttcttgaccttggacttgatcgcctggcgcagctcgcgctccatgttcttctgcacttcggcgcggaagccatcgagaccggtttccttcacgccgaacagagcgaagaactcttcgttcagttccggcagcttgggctcggctacgctattgacggtaacggtgaactcggcagccttgttggccaggtccaggttctggtagtcctcggggaaggtcaggttgagcacacgctcttcaccggccttcgcccccaccagcccttcttcgaagccggcgatcatgcgaccggagcccagtaccagcagggtgcctttggcggaaccgccggcgaaggcttcgccgtcgatcttgccgacgaagtcgatgttcaactggtcatcgttctgggcggcacgctcgaccacttcgaaacgggtgttctgcttgcgcaggacgtcgagcatattgtcgacatcagcatcggaaacttcggcctgcaggcgctcgaccttgatgtcttccaggccggaaacggtaaattccgggaagacttcgaaggttgcgatgtattccaggtccttgcctttctcgaaggacttgggctctaccgacggcgaaccggccggattcagcttctgctcgaccacggcttcgtagaaggtttcctggatcagatcgcccatggcttcctggcgcgcggaagcttcgtagcgctgacgaatgacactcatcggcaccttgccggggcggaaacctggaatcttggcacgacgggcggtctgctgcagacgcttgttgacttcggtctcgatacgctcggcaggcacaccaacggtcatgcggcgctcaagagcggaagtgctttcaacagaaacttgcatggatattcctcgttgcacagacgtaagccggtccttccggctcccagaatcaagggcatgcattctagtagagggaaaagcagaagtcaccccgccagggtgcaggcggatccccggggtgtttccggccgcttccgccgatcgcagcccgatctcgaacgagtcgctggagcttcgccggaagcgggcgcatataatgccagccgattccgctccgaccgatgaaaccctatggactgccctaccctcagcaaggtattgctcgtcgaagacgaccagaagctcgcccgcctgatcgccagtttcctttcccagcatggtttcgaagtgcgccaggtgcatcgcggtgatgccgcgttcgccgccttcctcgacttcaagccgcaagtggtggttctcgacctcatgctccccggacagaatggtctgcaggtgtgccgggagatccgccgggtcgcgaacctgccgatcctcatactcaccgcccaggaggacgatctcgatcacatcctcggcctggagtccggcgccgacgactacgtgatcaagccgatcgagccaccggtgctgctcgcccgcctgcgcgccctgatgcgccggcacgcgccccttcccgcctccccggaaagcctgacattcggcaagctgaacatcgaccgacggcggcgcgaagcggaactcgaaggcctcggcatcgaactgaccacgatggagttcgagctgctctggctgctggccagccaggcaggggaaatactttcccgcgacgagatcctcaaccagatccgcggcatcggcttcgacggcctgaaccgcagcgtcgacgtctgcatcagcaagctgcgcaataaactgaaggacaatccgcgcgagccggtccggatcaagaccgtctggggcaagggctacctgttcaacccgctgggctgggagctctgaatgctgcgcctgttcctgcgcctctacctgctactggccctggggttcgccgccgcgatcttcgtggtcgaccatgtcatcgacgcgttctacgacagcatcgtcgagaactatcaccgcgacgccgttcgcggccaggcctattcgctggtggaaaagctggccccgctggaccaggccggacgccagcgacagctcgaagactggcgtccccactacgggctcgagctgagcctgacggatgccaggcaggcgaagctgacgcaggaagagcaggccctcctcgacaagaacctgctggtggtacgcgaggacttcacggaattcatcagccgcatcgacgcgggcccgcagctgctcgacatcaagctgccgccggaaccctcgctgaccccactattcaccgtgctggcctacatcctgctcggcgtgctggtcggcatcgccctgctggtatgggtccgcccgcactggcgcgacctcgagaccctgcgcctggccgcgcaacgcttcggcgacggcgacctgtcatcgcgcacgcgcattttccgacgctccgacatccgcaccctggcccagcacttcaaccagatggccgaccgcatcgaaagcctgatcagcaaccagcgtgaactgaccaacgcggtatcccacgaattgcgcacgccgatctcccgcctgtccttcgaactcgagcaattgaacaagcaggtcgacgccgaagtacgccacgacctgatagaggacatgcgcgccgatctcggcgaactggaggaaatggtctccgaactgctgacctacgcccgcctggagcacggcaacgtcgggagccaccgggaaatcgtcgacgccgcgagctggctggatagcgtcgtcgccgacgtcgccctggaagccgaagccgccggagtcacctgcgagatcagcgcctgccaggtcgaacagatccgcatcgagcctcgcttcatggcgcgcgcagtgatcaacctgctgcgcaacgccattcgccacgcacactcgcgcgtcgaaatcgccctcctcgatcaaggcgacagctgtcagatacgggtcaacgacgacggccccgggataccggcggacgcccggcagaagatcttcgaacccttttcgcgcctggacgacagccgcgatcgcagcaccggcggcttcggcctgggcctggcgatcgtccgccgggtcgcgcaatggcacggcggctatgcggaagcgctggaaacgccgcaaggaggcgcctccttccgcctgacctgggagcgaccccgttgacagcggaggcttaacaatctttcacagattgctgacaaagccgtaaggactgccagccaggcccgccctagcatgggacacctcgcctttccgccaggtgttccatgtttcgtgcaatgcatctttcccttctcggctgcctgctcggcaccagcggctgccacggactgccgcccgccccgccagcgccgagcgccgccgtgggcaactacggcgaggtcatcgactatctgcaacgccacatccgccgggaaatggaaaggcaggacgtgcccggcctggccctggcattggtcgacgaccagcaactggtctgggcccgcggtttcggctatgccgaccgacagcacaggatcaacgccagcgagcacaccgcattccacgccggcgacctgtccaagctactgatcgccagcgcgaccctgcaactggccgaacgcggccaactctctctcgacgccccgctccaggacaccttgcgcgagttctacgtacgctcacgcttccatgccgaccagagcgaggcggatcgcgcgatcactttccgccggctgctcagccaccagtccggccttcctggcgaacacctgccgcccctgttcggcgaacgcccgagctcactcggccaactgccggcgaaagtatccggcgtctggctgagcaatccgccgggaacccaggtcgcctattccaaccttggctacgagctggtcggcgcggctatcgagcgcaacaccggaaagcacttcgagcagcacatgcgggagcacctgctggaccctttgcagatgactcgctccagcttcgccaggaacgccctgccccaggcgcaacgcgcccacggctacagcggcggcggcggcggtcgccccggctccgccgccgccagcgacctcccggtcaacggcctgtggagcagcccggtcgacctcagccgcttcgtccgcatgctgttcgccaacgggcgccacaaggagcgccagcttctccggaaacactccgtcgaggagatgttccgccagcagaacgccggcaatgccctggacttcgactgccaggtgggcctggcctggttcctcagcccgtgcggctccgcgccgctggaaggaggcatccgtcactatgagtacgccagcgccacccgaggattcagcgcccatctgattctgctgccggaacagcgcctcgccgccattgtcatgagcaacgccgatgacagcgggtcgcttactgcctccctggcccggcaagcggcgtcgctcatgctgcaggtcaaacagggcgctcgtcgccccgccgtacagcccacccccgcgcgcgcccccgcactgaaggtgccgagcccggaggaccggcgacagctatacggtcgctacgcaacccgccaaggccagattcgcctgtacgagcgcaggggtcgcctgtacgcggatttcggcgaacaacgcgtggaactgttgcgcgacacctcgggctggctgcagatgagaaaaagactgctggggttctggcctgtcggcgtggacagcgccggacagttgcaactggacgtggtcagctacggccaacgccgaatcctggtgtcccgccgccacgaccagaccgcctacctcggcgagcgcatcgagccgacatccctgccccaggcctggaacgaagccgtcggcacctaccgcgtcgccagcacgggccggcacagctacctgaacggcctgagcatcaggatcgaagacggcttcctgctggtgcgcgggcaagccggaggaactcgctccggcgagttcatcctgcaacccatcgacagcgcacacgccgtcctggccggcagcggccagggcctgggagacaccttcagtcgcgacttcgacggtctgaacgcgctcggctaccgcttcgcccagcaagacaccaaggcacgtccctggctgcaacggaaggagtccccatgagaagcccctccctgtgcctcgccggcacgctcgccagcctctgctccgccgctgtctccgaagagtggcatgacagcatcggcccgagcgccctggtggaataccgtttctgaaacacaccgagagagaatacgaacatgttcaccgccttcgccttccgcggccgccaaccttataccgttcgccggaacacagcccagggcgcgaccttgcgcccgaaactggcgaaccggccggatgcgccggtttcagccgggaagtcctgaactgcggagcgtctacggcctcattggcaacggatcacgccgctggcgatttcgtcgtcgatggagcgcagcgcatcggcatcctggtgcatctgctcgatcacctcgagcaggcgctgcgccagcttcggatcgttcgcccgctcgacggcgcgcatgacctcgaccgcagccgattcatgattgttcgccatctgcttgagagccttgcgcaagcgctgctcggtccatttcatcgacatgtcgcttcacccagactgcatatacggacccgccaggaacgacaggctcgcttaagagcgccggacccggaacaagttcaacctgccgtcgcgcccatgagggcggattgggtaccggaaaggcaagcggagaagagatcgtgaagcgcaaacgaaaacgccaggcacaaggcctggcgcttcgaaatatggggtggacgatgggaatcgaacccacgacaccaggagccacaatcctgtgctctaccaactgagctacgcccaccatatcgtgaatcgtgccggacgttccggcttcaaccgcagcggccggacaagccgagcctgaaggtggtgcggacggagagactcgaactctcacgccttgcggcgctggaacctaaatccagtgtgtctaccaattccaccacgtccgcgggacactgcttggaaatgaaaacgccaggcctcgggcctggcgcttcggaatatggggtggacgatgggaatcgaacccacgacaccaggagccacaatcctgtgctctaccaactgagctacgcccaccatattacgacttgcggtaaaacatcgcctgcttcttgccgattcgccgaatggcgcacccggcaggactcgaacctgcgaccatccgcttagaaggcggatgctctatccagctgagctacgggcgctttattcatctgcattcaatgctgagcgcaaactttaagctctggcaatcacaaagtcagcaaccgacttgcattacctcttaccctgcgtccggctgtgctcggcaagcggggcgcatgttatacaggggacgaaaggccgtcaacgggttttttaaaaaaattcagctatataaaggagttacggcaaatccgcgggtcgcctcctttgccccgggcggcgtccatgcgaaaatgcgcgtcctttttccacccgattcgatggttacccttccgacatgaccgcacaactgatcgacggcaaagcgatcgccgccaaccttcgccagcagatagcccaacgcgtgaccgagcgccgccagcaaggcctgcgcgttcccggcctggcggtgatcctggtcggcaccgatccggcctctcaggtctatgtggcgcacaagcgcaaggactgcgaggaagtcggctttctctcccaggcctacgatcttcccgccgaaaccagccaggacgacctgctggccctgatcgaccgcctgaacgacgatcccgccatcgacggcatcctggtccagctacccctgcccgcccacctggacgcctccctgctgctggagcgtatccacccggacaaggacgtggacggtttccatccctacaacatcggccgcctggcccagcgcatgcccctgctgcgcccctgcaccccgaaaggcatcatgaccctgctcgccagcaccggcgccgacctgtacggcatggacgcggtcgtggtcggcgcctcgaacatcgtcggccggcccatggctctggagttgctgctgggtggctgcaccgtcaccgtgacccaccgcttcacccgcgacctggccgaccatgtgtcgcgcgccgacctggtggtggtcgctgccggcaagccgggacttgtcaagggcgagtggatcaaggaaggcgccatcgtcatcgacgtcggcatcaaccgccaggccgacggccgtctggtcggcgacgtggaatacgaggtggcggcgcaacgcgccagctggatcaccccggtgccgggcggcgtcgggccgatgacccgcgcctgcctgctggaaaataccctgcacgccgccgaacacctgcacgactgaggtcgccggtaatgaaaagccccgcgttcgcggggcttttcatttatcgctgcgggttcagtcggccaggcgccaggtagtgccgcccttgccatcctccagcaccacgcccatggcggtgagctgatcgcgaatccggtcggactccgcccagttcttcgccgcccgcgcctccaggcgcgcctggatcagcgcctcgacctcggccgcatcgaccttgccctcggcgcccgcctgcaggaaggcttccggctccagttgcagcacccccagcaggccagccaactgcttcaggcgcgcggccagcgcggccgccgccgacaggtcgctttcgcgcagacgattgacctcccgcgccagctcgaacagcaccgagcaggcacccgcggtattgaagtcgtcgtccatcgccgcggcgaagcgctcgacatactccgccgcttccgccggcgccgcctcgggcagccccttgagcgcgttgtagaaacggtccagggccgccttggcctcgcgcaggttctcctccgagtagttgatcggactgcggtaatggctggcgatcagcaggtaacgcaccacttcggggtgatatttctccagcacttcgcggatggtgaagaaattgcccagcgacttggacatcttctcgccgttgatggtgatcatcccgcagtgcagccaggacttggcgtagggcttgccggtcgcggcctcgctctgggcgatctcgttctcgtgatgagggaactccaggtcgttgccaccgccatggatgtcgaaggaatcgcccaggcagcaggtggacatcaccgagcattcgatgtgccagcccgggcgcccctcgccccagggcgacgaccagctcggttcgccaggcttggcgcccttccagagcacgaaatcgagcggatcctccttcgcttcgcccggctcgatccgcgcaccgatgcgcaggtcctcgacccgccgccgcgacaacttgccgtagccagcgaacttgccgacccggtagtacacgtcaccgttgcccggcgcgtaggcatagcccttgtcgatcaggatctggatcatcgcgtgcatgccggcgatgtgatcggtggcgcgtggctcctggtccggcttgaggatgttcagccgggcctcgtcctcgtgcatcgccgcgatcatgcgctcggtcagcacatcgaacggctcgccgttctcgttggcgcgattgatgatcttgtcatcgatatcggtgatgttgcgcacgtacgtcaggtcgtagccacggtggcgcaaccagcgggtgatcacgtcgaacgccaccatgctgcggccgtggcccagatggcagtagtcgtacacggtcatgccgcacacgtacatgcgtacctggttgccgaccagcggcgtgaagacttctttggtcttgctcagcgtgttgtagatctgcagcacggtctttcctcagccctgtccccaggagtcacgcagggtgacggtacggttgaacaccggcttgcccggcctggagtccttcaggtcggcgacgaaatagccttcgcgctcgaactggaagcgatcctccgggttcgcctggcccagcgacggctcggcgcgacagccggccagtacctgcagggagtcggcgttgatgttgtcgaggaagctgccgccctcttccgccttctccggattggccgagcggaacagccgatcgtacaggcgcacttcgcactcgacgctgccctcggccggcacccagtggatcacgcccttgaccttgcggccttccgggttcttgcccagggtgtccggatcgtagctgcagcgcagttcgacgatattgccgtcggcatccttgatcgcttcgtcggcacggatcacgtagctgccgcgcagacgcacctcgccaccggggatcaggcgcttgtagccggccggcgggacttcctcgaagtcaccggcatcgatgaacagctcgcgaccgaacggcagtacgcgcactcccatgtcttccttcggatgacgcggcaactcgaggttctccacctgcccttcggggtagttggtgatcaccaccttgagcggtttcagcacgcacatggcacgcggcgcggtggcgtccaggtggtcgcggatgctgaactcgagcatgccgatgtcgaccacgccgctggcacggttcaccccgatcatctcgcagaagttgcggatcgactccggggtgtagccgcggcggcgatagccggacagggtcgacatgcgcggatcgtcccagccgctgacatggccttcgtcgaccagttgcttgagcttgcgcttgctggtcacggtgtagttcaggttgagccgggagaattcgtactggcgcggttgcgcaggtaccggcaggttggccaggaaccactcgtagagcggacgatggtcttcgaattccagggtgcagatcgaatgggtgatgccctcgatggcgtccgactgaccgtgggtgaagtcgtagctcgggtagatgcaccacttgtcgccggtctggtggtgatgcgcatggcggatgcggtacaggatcggatcgcgcaggttcatgttcggcgaacccatgtcgatcttcgcccgcagcgaacgggcgccgtcggggaactcaccggccttcatgcgggcgaacaggtcgaggttctcctccaccgaacggtcacggtaagggctgttgcggcccggctcggtgagggtgccgcggtattcgcgcatttcctcgggaccgaggtcgcagacgaacgccttgccggccttgatcagctcgatggcccaggcatgcaactggtcgaaatagttggaggcatagcagacctcgccggaccactggaagcccagccacttgatgtcggcctcgatggcatcgatgtactcctggtcttccttggccgggttggtgtcatcgaagcgcagatggcaatcgccagcgaattcctgggccaggccgaagttcaggcagatcgacttggcgtggccgatgtgcaggtaaccgttgggctccggggggaaacgggtgacgatcttcgcgtgcttgccggcatccaggtcggcttgaacgatctggcgcaggaagttcggggcggcggtggtctctggcttgctcatgggatccttggtcatgctctcgcccgaccagggtaggccgggcaaatcaaagcgcttatcatagccgaagctgtcaaccccctgacaggccttcgattttcacgacaaagcggattacccacatgatcaagctgcataccaaccatggcgtcatcaccctgaagctcgatgaagagaaagccccggaaaccgcggcgaacttcaaggagtacgtgaaaagcggccactacgacaacaccgtcttccaccgcgtgatcaacaacttcatgatccagggcggcggtttcgagccgggcatgaagcagaagcccactcgcgcaccgatcaagaacgaagccaacaacggcctgaccaacaaggtcggcagcatcgccatggctcgtaccatggacccgcattcggccagcgcgcagttcttcatcaacgtcgccgacaacgatttcctcaaccataccgcccccaccacccagggctggggctatgccgtcttcggcgaagtggtcgagggcatggacgtggtcaacaagatcaagggcgtggccaccaccatgcgcagcggccaccaggacgtgccggccgaggacgtgatcatcgagaaggccgaaatcgtcgaagaatgaagcgatgagcgtcctgttcatctcggacctgcatctcgaagcggaacgcccggacatcacccgggcgtttctgtctttcctcgatgagcgcgcccgtcgggccgaggccctgtacatcctcggcgacttcttcgaagcctggatcggcgacgacggcatggacgccttccagcgctccatcgcccagtccctgcgccaggtggccgacggcggtacgcgcatctacctgatgcacggcaatcgcgacttcctcattggcaaggcgttctgccgcgaggccggatgcacgctgctgcccgacccgagcgttatcgacctgtacggcgagccggtattgctgatgcacggggacagcctgtgcacccgagacgaggcctacatgcgcctgcgccgctggctgcgcaacccgctcacgctctgggtactgcgccacctgccgctggccacccggcacaagctggcacgcaagctgcgcaaggaaagccgcgcgcagacccgcatgaaagccgtcgacatcatcgatgtcacgcccgaagaagtgccccgggtcatgcgcgggcatggcgtgcgtaccctgatccacggccacactcatcggccggccgaacacccgctggacatcgacggccagcccgcccggcgcatcgtgctcggcgactgggaccgccagggctgggccctggagatcgacgccaacggccatcgccaggcgcccttcccgctctgacccaccccaggcccgccatgcgggcctttcagcgaagcattatgcgattcgcattttttccgccgtccatcttgacgtcgcgggccacctttcagcaggatcgcgctcccccaccccgcatcaaggaatgatcgtgatcatctcgaagggaaacctgatcaagttcgtcgccgcccccctcggcgtgctcgccctcggcttcggcctgttcaacggcgtgttcttctataacgaagccggcttcatgacccacgtaaggaccatcttcggcgacgagaagatcgtcgatgacgtcggctacgcgaccaagtggttcggtcgcgccaccacctggaagaaggccatcagcgtgcagtccgtgctggtcatggacgataacgacaccaatccggacaacgacggcctcggcgccaccatcgaggctttcccgatcgtgttcctcggcaacgtcgacgccaaggtcgaatcttccgcgcgctttcgcctgcccggcggcgagccgttcctgaagatggcccaggaataccgcaacccggacaatttcatccgcaccgcactggtgccggcgatcaaggaaaccctccaggccaccgcttcgctgatgagcgccgacgactactacgccggagcccgcagcgaattcgccgccgagttcgagaaccagctcaacgacggcctgtacctgatcaagcgcaaggaagtccgcgggccgcgcggcgccattccgcaccagaccgcgatcctccaggccggcaccgagcagggagcgttcggcgacaacaacgccagccagttcgtcaccgagaaggtcaccgatgccaagggcatcccggtacgcaagcaacagcagttccgcaagttcggcgtcgaggtggtggaagcgcggatcaccaacgtcgatcccaacccgcagtacaagcagcgcatggtcaaggtccagcaggcgctcgccgagctggcggtggcgcggcagaaccgcctgaaggaagaagaggaaaagctgctggtcaccgcccgcggcgagaaggaagtcgaggccaagcgccaggaaaccctgcgcgaccagatcgaacgcaccacccaggcggaaaccgacaagcaattggcggtgatcaacgccgagcgcgagaagcagcgcgccgagatcgagaagcagaccgccgaactgctgcgcgacaaggccacggtgaccgcccaggccaccaagatcaccgccgacgccgaggcttacgcccgcgaagcggtgatcaaggcggacggcgcgttgcagccgaagctcgacgcgctgatcgcgatcaacaaggtctgggccgaagccgccgcccaggcccccgtccccagcgtaatgatgggtgccggcgccaacggcgcggcgagccgccaggacgagatcggccagctgatgggcgttctggcgaccaaggccgcccgcgacctggccctcgacctcaaggtcaaggactgatccaggcagcaaaaaaagcgccccgcggggcgctttcttgtttccggctcaggccaccaggtccaccgggaggccgctgtggaagcggaattcgttgtccggactgctgatcagctcggcctccttggcccgcaccacctcgatcgtccgctccacgtcggcctcgtcgccgtactggtaggccagcttcaggtagtcctggaaatgccgcgactcggacttcagcaaaccgccgtagaatttcgccagctccgcgtccaggtgcggcaccagggcggcgaagcgctcgcaggaacgcgcctcgatgaaggcgccgaccaccagcgtatcggtcagccgctgcggctcctgcttgcgcaccaggtcgcgcagcgccgaggcgtagcgggaggcgctgacattgaccaccgggataccgcgtttcttcaggatcgccagcacctgctcgaagtggcgcagctcctcgcgcgccaggcggctcatcttgttcaccaggtccaggcggccggagtacttgccgatcagttgcatcgccgtcgccgcggccttcatctcgcaggccttgtggtccagcagcatgacgtcctggcgctccagggccgcctcgacccaggcggcgggagtggaacaggcaaggaattggtcgatctcgggcaacatggtgcaggtcactcattctggaaagggcctgccatgacgctggtcggggcaggaaaggcggagcattatacggaagctgcggcggtcgggcaggccgacccgtttgatatgcatcaagagcagcggctggattgcgtctagagttgtttcagcgataaccacaagcactcagggagacgatcatgcaagccattcgcagcatcctcgtggtgattgaaccggaccagctggaaggtctcgccctgaaacgggcacaactgatcgccggcgtgacccagtcgcacctgcacctgctggtctgcgagaagcgccgcgaccacagcgccgctctcaacgacctggcccaggagctgcgcgaggaaggctacagcgtctcgaccaaccaggcctggaaggactccctgcaccagaccatcatcgccgagcaacaggccgaaggctgcgggctgatcatcaagcagcactttcccgacaacccgctgaaaaaggccatcctcaccccggacgactggaagctgctgcgcttcgcgccctgtccggtactgatgaccaagaccgcccggccctggacgggcggaaagatcctcgccgcggtcgacgtcggcaacaacgacggcgagcaccgctccctgcacgccgggatcatcagccatgcctacgacatcgccggcctggccaaggccacgctgcacgtgatcagcgcccacccctcgccgatgctctcctccgccgacccgaccttccagctcagcgaaaccatcgaggcccgctatcgcgaggcctgccgcaccttccaggccgagtacggtttcagcgacgaacaattgcacatcgaggaaggtccggccgacgtgctgatcccgcgcaccgcgcagaagctcgacgcggtggtcaccgtgatcggcaccgtggcgcgcaccgggttgtccggcgcgctgatcggcaataccgcggaagtggtgctggataccctggaaagcgacgtgctggtgttgaagccggacgacatcatcgcccacctggaggagctggccagcaaggagtgaccgctggtcggacgaaaaagccgcccaagggcggctttttcgctggagacaccgcctatctgtcgatcgcctgcaggaacgagggcgcgatgtagcgctggtaatgcgcttccgacagcaggaagaattcccggtcgatggcatcgcgcaggtccggcaggctccagtcgcggaattccggcagcagtgccacgccgtaggcttcgatctggttgatcagccgggaaccgcgggcgatcaactggtaggcccagcaatagggggactgctcggggacgaaacggatctgccgctgctccagttgcaggcgcaggcgcgcggcgtcgaagacttccagcttggcggccatcacctgggccagcaactgctcaaggcgactccagacagcccgcttttcctcggcgtcgtagaggttccaattgaccacctcatggtggaaacgcttgcagccacggcataccaggtcgccgtataccgtggagcaaagccctacgcagggggttttgattctttgcgaagacatggccgggacaacgaaaacaaagcggcatcttagccctttgtctaatcaagttcaccccgtggttcctagggtttccgacttaactttgcgtcgagtttccagtaacattggcccgcctttttaggcgccaatgtccgttagaagctgttttcaaagcgtcacgagcacagtttccggcaggtacgctggcgacggcgcctccctcaagcgtctcgccagccccaccccagcccgccggcgtaaaactttgaaaacagcttctgtctggaacctgccgatgccctcgtaggttggtggattaccgtccacctgggcctgacgagcggatctgcgtcggttcctggatacgtgtcccccgggaccactgatgagggaaatactgtgcttgaagcctaccgcaaacacgtagaagagcgtgccgcccagggtgtcgtgccccaaccgctgaacgccgaacagaccgcaggcctggtcgagctgctgaagaacccgccggccggcgaagaagaattcctccttgacctgatcaccaaccgcgtaccgccgggcgtcgacgaagccgcctacgtcaaggccggattcctttccgccatcgtcaagggcgaagccacctccccccttatcgacaagcaacgtgccgccgagctgctgggcaccatgcagggcggctacaacatcgccaccctggtcgaactgctggacgacgccgaactggccaacaccgccgccgaacagctgaagcacaccctgctgatgttcgacgccttccacgacgtcgccgagcgcgccaagaagggcaatgccgcggccaagtccgtgctgcaatcctgggccaatggcgagtggttcaaggccaagccggaagtcccggaaaagctgactctcaccgtattcaaggtccccggcgaaaccaacaccgacgacctctccccggcccccgacgcctggtcgcgcccggacatcccgctgcacgccctggccatgctgaagatggcccgcgacggcatcgagccggtccagccgggttcggtcggtccgctgaagcagatcgaagcggtcaaggccaagggcttcccggtcgcctacgtcggcgacgtggtcggcaccggttcctcgcgcaaatccgccaccaactcggtgctgtggttcttcggcgacgacattccgttcgtgccgaacaagcgtgccggcggcttctgcttcggcaccaagatcgcaccgatcttctacaacaccatggaagatgccggcgccctgccgatcgagttcgactgcaccaacctggccatgggcgacgtcatcgacgtatacccctatgaaggcaaggtcgttcgccacgacagcggcgaagtggtcaccaccttcgagctgaagaccccggtcctgctcgacgaagtccgcgccggcggccgtatcccgctgatcgtcggccgtggcctgaccgagaaggcccgcgccgagctgggcctgggcgcctccgacctgttccgcaagccggaagcaccggccgatagcggcaagggcttcaccctggcgcagaaaatggtcggccgcgcctgcggtctgccggaaggccagggcgtgcgcccgggcacctactgcgaaccgaagatgaccaccgtcggttcccaggacaccaccggcccgatgacccgcgacgaactgaaggacctcgcctgcctcggcttctccgccgacctggtgatgcagtccttctgccacaccgcggcctatccgaagccgatcgacgtcaagacccaccacaccctgcccgacttcatcatgacccgtggcggcgtgtcgctgcgcccgggcgacggcatcatccacagctggctgaaccgcatgctgctgcccgataccgttggtaccggcggcgactcgcacacccgcttcccgatcggcatctcgttcccggccggctccggcctggtggccttcgccgccgccaccggcgtgatgccgctggacatgccggagtcggtgctggtgcgcttcaagggcaagctgcaaccgggcatcaccctgcgtgacctggtccatgcgatcccttactacgcgatccagcagggcctgctgaccgtcgagaagaaaggcaagaagaacatcttctccggccgcatcctcgagatcgaaggcctcaacgacctgaccgtggagcaggccttcgagctgtccgacgcctcggccgagcgttccgccgccggctgcaccatcaagctgccggaacaggcgatcgccgagtacctgaagtccaacatcaccctgctgcgctggatgatcggcgaaggctacggcgacccgcgcaccctggagcgtcgcgcccaggcgatggaagcctggctggccaagccggagctgctggaagccgacaaggacgccgagtacgccgcggtgatcgagatcgacctggccgacgtcaaggagccggtgctctgcgcgccgaacgatccggacgacgcgcgtctgctgtcgagcgtacagggccgcaagatcgatgaagtgttcatcggctcctgcatgaccaacatcggtcacttccgcgccgccggcaagctgctggacaaggtcaagggcggtatcccgacccgtctgtggctggctccgccgaccaagatggacgcccaccagctgaccgaggaaggctactacggcatctacggcaaggctggcgcgcgcatggaaatgccgggctgctcgctgtgcatgggcaaccaggctcgcgtccagaccggttccaccgtggtctccacttcgacccgtaacttcccgaaccgtctgggcgatgccaccgatgtgttcctggcatcggccgagctggcggcggtctcctcgatcctcggcaaactgccgaccgtggaggagtacatggcctacgcgaaggacatcgacagcatggctgccgacgtctaccgctacctcagcttcgaccagatcgccgagttccgcgaagcggctgcgaacgccaagatcccggtcgtccaggcctgatccagcgacgcgtcgaacaagccccgccccgtgcggggctttttcttgcccggcgaaaacccccgcgccgcctggcatagcgcttgctgtggcagctatggaaaagcgcgccgacgacggcgccggcgcactggaaaacgggacggcccgcgccgccctcccgcactcgaggtggtgatgacagacagagcgatacgcagccaggcctgggccggcggttccgacgcaccggaaaagagcgccctggacatcggtttcatggcgctgaccgattcggcctcgctgatcgtggccgccacccagggcttcgcccagccctacggcctcacgctcaatctcaggcgccaaccgtcctgggccaccttgcgcgacaaactgctcagcggcgagctggatgccgcgcagtgcctgtacgggctggtctacggcgtccagctcggcctcggcggcagcgcggcaagcgagatggcggtgctcatgggactgtgccagaacggccaggcgatcaatctttccgaaccgctgaagcaggctggcgtgaccagtgcggaggcactgctccggcatcggcgccagaatggtgcacgcctgaccctggcgcagacctttcccaccggtacccacgcgctctggctgaactactggctggcgagcatcggtctgcatccgctgcacgacgtgcacagcgtggtggttccaccggcgcagatggtcggccatctccaggccgggcgcatcgacgggttctgcgccggcggaccctggggcgccctggccgtggaccagggccagggcttcaccatcgccaccagccaggcgatctggccggaccacccggaaaaggtcctcggcactacccgcgccttcgtcgacgcctacccgaacaccgcccgcgcgctggtcatggcggtcctcgacgccagccgcttcatcgaacagaacgccgagaaccgcctgggcaccgcgcaactgatcagcggccgcgactatgtcgacgctccgctcggcgcgatccagccgcgcttcttcggccgctaccaggacggcctcggcaacgcctggcaggacccgcatccgctgcgtttctatgccgacggcgaagtcaaccggccctggctctcggatggcatgtggttcatgacccaattccgccgctggggcctgctgcgcgaagacccggactacctgggcatcgcccgcagggtccagcagaccgcgctgtaccgggatgccgcgacggcccttggcctgtgcctggacggcgccgacatgcgccgctcgacactgatcgacgggcgcacctgggacggcagcgaccccgccggctacgcccgcagcttcccgatccacgccctggccgaaaccggccagggcatcgacctctgaccctggtgcgcccgccatgctgcgtatcctgctgatcgacgacacgccgaagaaagtcggacgcctcagggccgccctgctcgagagcggtttcgaagtggtggacgagtcggggctgaccatcgacctgccggcgcgcgtcgaagcgctgcgtcccgacgtgatcctgatcgacacggagtctcccggccgcgacgtgatggagcaggtctgcctggtcagccgcgatcagccgcgcccgatcgtgatgttcaccgacgagcacgatccgggagtgatgcgccgcgccatccagtccggggtcagcgcctacatcgtcgaaggcatccaggccagccgcctgcaaccgatcctcgacgtcgccatggcgcgcttcgagagcgaccaggcgctgcgcgctcaactgcaggcgcgcgaggcgcagctggccgagcgcaagcgcatcgagctggccaagggcctgctgatgaagatgaagcattgcggcgaggaggaggcctacacgctgatgcgacgccaggccatgagccgccagcagaagctgatccaggtcgccgagcagatcatcgccatgcacgacatgctcggcggctgaatccggctgggcagctggcgatcatatcgccagccaccctgctggcccccggcgcagagcggcgcggctatgctcgtgcgcccggaacggccctatccgttctgggagctaccccctcgccaccctcgactagcatgaccagggaggcccgcagtggacgcccagggctaggagccgcaggcgtccgcccgaaccgcaccgccgactcagcggtcaggagatgctcagcatgatcgatctcagcacctggaaccttaccattcccaccgaacccaccccgcaggtgatcaccacccagcaactcaacaacggctaccagagccggtacttccagcaaggcaacgatggcggcctggtcttctgggtgcccatcgacggctcgcacaccgaggacagcacctatcctcgcaccgaactgcgcgaaacccaggccgacggcagcctcgacaactggtactactggcaggccgacaacgaactgcgggtgaccatgagcgtcgagaaggtcccctcgaagaacaaggtgatcatcggccagatccacagcaagtcgccacagaccgacgacggcgaacctctggtgaagctgcagtactactacaagcccgaggaaggcctcggccgggtcgaggcgctggtacgcaaccacccggacgattcctatagccgcaacgtgtcgatcctcgagcaggtacgcctgggcgagcgcttcaactacagcctgcgcgtcacctccagcggcgagttggcggtgcgcgcgcgcagccaggacggcgaagaagacgcttactaccagaccctcggcagcgcctggaacgaccagttgctctatttcaaggccggcgcctacgtgaacgacaacgccggcgacagcggcgaaggcagccgcgtgaccatctaccacctgaacaccgcccatcgctgaaccgccgacggcacacggacgcgccgccccagccctgtgcaagcccccgacgtctgccaccgcggcgtgcacgcccgacgccatggttgtccctgcaaccgctctacgccgcgctttcgacaacttggcaaagagcttgctacgtcctgcctgacggtagccaacggcggttacccatccccgacaaagacgtcgcgcggcctctccttcccggcagaggcccgtggcgtcttcgtcgtttcgccccagcgtcggggcgggtgggtggtccgctgtcggacgctcaccttgtagcgatgcaacttccgccgggcggccgttccgccccgattccgctggatacgaggtgttcgatgaacaacagcttctggaaggccggccatgcgccgaccctgttcgcggcgtttctctatttcgacctgagcttcatggtctggtacgtgctcggcccgctgggggtgcagattgccggcgacctgcaactgagcacccaacagcgcgcgatgatggtcgccacgccgatcctcgccggcgccgtactgcgcttcctgctcggcctgctggccgatcgctggtcgccgaagagcgccggcatcctcgcccaggtcatcgtcatcgccgccctggcggccgcctggctgctgggcgtgaacagctatgcgcaggcactgctgctggggttgttcctcggcttcgccggggcatccttcgccgtggccctgccgctcgcatcgcaatggtacccgccgcaacaccagggcaaggccatgggcatcgccggcgcgggcaactccggcaccgtgctcgccgccctcttcgcccccggcctggccgccgcgttcggctggaacaatgtgttcggcttcgccctgctgccgctcgtcctgaccctcctggtgttcgccatggtcgcgcgcaacgccccgcagcggccggcgcccaaggccatgggcgattacctgaaagccctcggcgaccgcgacagctggtggttcatgttcttctacagcgtcaccttcggcggcttcctcggcctggccagcaccctgcccggctatttccacgaccagtacggcctgaacccggtgaccgccggctactacaccgccgcctgcgtcttcgccggcagcctgatgcgcccgctcggtggcgccctcgccgatcgcatcggcggcatccgcagcctgctgatggtgtacaccctggccgccatctgcatcgccgcggtcggtttccacttgcccagcgcgatggccgccctcggcctgttcgtggtcgccatgctcagtctcggtgccggtaatggcgcggtgttccagctggtaccgcagcgcttccacaaggaaatcggcgtgatgaccgggctgatcggcatggccggcggcatcggcggcttctgcctgactgccggcctcggcgcgatcaagcaaagcaccggcgactaccagctcggcctgtggctgttcgccagtctcggcgtgctggcctggttcggcctccacggggtgaagcggcgctggcgcaccacctggggctcggccgcggtcaccgccgcgcgggtctgagcgtggggttgcgactgagcattggcgaagccagcgcctgcgggcctcgcacggaaaaccaggacgcgctgcgggtggtcaccccggcgccggccctggccgccagcaagggacacctgctggccatcgccgacggtgtcagccagtgcgccgatggcggcctggcggcgcgcagcagcctgcaagcgctggccctggattactatgcgactccggaaacctgggccatcgtgcagtccctggaccgcctgctgctggcgcagaaccgctggctacaggccaacggcggcggccagccgctgctcaccaccctcaccgccctggtgctgcgcggcacccgctacaccctggcccacgtcggcgattgccgggcctacctgtggcgcgacggcgagttgctccggcagaccagcgaccacgtctgggaacagccgcacatgcaacacgtgctgacccgcgccctgggactggaccagcatctggtggtcgactatctggaaggcgatctggagcccggcagccagtggctactggtcagcgacggcgtctgggcgacgctgggcgacagcggcatccgcagcatcctgcgcaacgccgaggagccgcagcgcagcgccgaggccctggttcgcgccgcccacctggcaggcagccaggacaacgccagcgccctgctggtacgcgtggaagccgtgcccgcaggcagcctcggcgacgccctcgcgcaactgggccactggccactgccgccgccgctgaagcccggccagctcttcgaaggctggcgggtccggcagttgctcggcgaatcccgccagtccctgctctaccgggtcgaggatggccagggccaaccctggctgctgaagacccttcccgccgcacgtgccgacgatccgctggcaacccaggccctgctgctcgaggaatggttcctgcgccgcgtccagggccggcatttccccgagctgcacggattggcgcagcgccagcatctgtattacctgatgcgcgagcaccctggagagactctcgccgagcgcttgcgcaaccatggtccgctgtcgctgccggagtggctggggctggccaaccagctgctgcgcgggcttggccagttgcatcgacgcaacctgctgcaccgcgacctcaagccggaaaatctccacctcggccgcgacggcgagctgcgcctgctggatttcggcctggcctggtgtccgggattgtcgcgcgaagacccccatctgctaccgggtacgcccagctacctggcgccggagtgcttctccggcacctcgccctcggtgcgccaggatctctacgccaccggcgtctgcctctaccaggcgctgaccgggcgctatccctatggcgagatcgaagccttccagcacccgcgcttcggtcgccccgtcccgcccagccgctatcgccccgacctgccggcctggatcgacgacctgctgctgcgcgccgtcgcctgcgaccccgcacagcgcttcgagaccgccgaggaatggctgctctcgctgcaacagggagaagcgttgccggccgcggcaacccgcccattgctggagcgcgaaccgctgcagacctggcgcgccatcgccctgctgtccctggccgccaacctggcgctgctcctggtctggctgaagggctgagaggcaccagcccggtgcgatacgccccggcacggggcagaaagaccgcggggaggccccgcgttatccctgcaaggccatggagataggcaatagcgcaagttggcacggcgcctgcttgggttctcccgacaatcgacaacaaagcgcctgcctcaacgacgaggcggcgtttcccgaccgaacgggacctggacaaaggcgtcctgctggcaacagcgggacgccttttttgtttgcgccaaccttatgcaggagctactccgcatgaagaagatcaagctggtgatggtcggcaacggcatggccggggtccgtaccctggaagaactgctcaagctcaactcggacttctacgacatcacggtgttcggcgccgagccccatcccaactacaaccgcatcctgctgtccccggtgctggccggcgagcagaccttcgaggaaatcgtcctcaacgacctcaactggtatgcggaaaacggcatcaagctcctcctcgaccgcaaggtggtgcagatcgaccgggtccgccgcagggtggtcgccgcggacggcagcgaggccgagtacgaccgcctgctgctggccaccggctcggtcccctttatcctgccgatacccggcaatcgcctgcagggcgtgatcggctaccgcgacatcgccgacacccaggccatgatcgactgcgcccggacccacagccacgcggtggtgatcggcggcggcctgctcggcctggaggcggccaacggcctcaagcaacgcggcatggacgtgaccgtcgtgcacctctccgactggctgctggaacgccaactggaccgcaccgccggcaaactcctgcaaggcgcgctggaagcccgcggcatccgcttccgcctgaacacccagacccaggaactgatggacaacggcagcggccgggtctgtgccgtgcagttcaacgacggcgacgtgattcccgccgacctggtggtaatggccgccggcatccgccccaataccgagctggccgaaagcgcgggcatcccctgcaaccgcggcatcctggtcaacgacaccctgcagacctacgacccacgcatctatgcggtcggcgaatgcgccaaccaccgtggcatcgcctacggcctggttgcgccgctgttcgagcaggccaaggtctgcgccaaccacctggctcatctcggctacgcccgctaccagggctcggtgacctcgaccaagctcaaggtgaccggtatcgacctgttctccgccggcgacttcatcggcggcgaaggcagcgagaccatcaccctttccgaccccatcggcggcgtctacaagaagctggtgatcaaggacgatgtactggtcggcgcctgtctctacggcgacaccgccgacggcggctggtacttccggcagatccgcgagaaccacaacgtcgcgcagatccgcgaccacctgatgttcggcgagaacgccctcggcgatgtcggccaccagggccagaacagcgccgcgagcatgcccgacacggccgaagtatgcggctgcaacggcgtctgcaagggcaccatcgtcaaggcgatacaagaacacggcctgttcagcgtcgacgaagtcaagaaacacaccaaggccgccagctcctgcggttcctgcgcgggattggtggaacagatcctgatcagcaccgtcggcggcgccgccgacgtcaagccgaagagcgagaaggccatctgcggctgcagcgacctcaaccacgggcagatccgcaaggccattcgcgaacaccggctgaccagtctcgacgccgccatgcgcttcatggactggaagaccccgaacggctgtgccacctgccgcccggccctgaactactacctgatctcgacctggccgggagaagccaaggacgatccgcagtcgcgcctgatcaacgaacgcgcccacgccaacatccagaaggacggcacctactcggtggtaccgcggatgtggggcggcgtgaccaacgccgccgagttgcggcgcatcgccgacgtcgccgacaagtaccaggtgccgatggtcaaggtcaccggtggccagcgcatcgacctgctgggggtgaagaaggacgacctgccggccatctggaaagacctcgacatgccctccggacatgcctacggcaaatccatccgcaccgtgaagacctgcgtcggcagcgaattctgccgcttcggtacgcagaactcgacgcagctgggcatcgatctggaacacgacctgttcaacatgtggtcgccgcacaaggtcaagctggcggtctccggctgcccgcgcaactgcgccgaggccgggatcaaggacgtcggcatcatcggcgtggactccggctgggagatgtacatcggcggcaacggcgggatcaagaccgaggtcgcggagttcttcgtcaagctcaagaccgccgaagaagtgcgcgaatacaacggcgccttcctccagctctaccgcgaggaagccttctacctggagcgcacggtgcattatctgcagcgggtcggcatggagcacatccgcaaggcggtggtcgaggacgcggaaaaccgcaaggcgctcaacgaccgcctgcaattcgccctgtccttcgagcaggacccatggaagcagcgcatcgaacagccgcaattgaagaaggagttcgaacggattccgctcaagcaactggaaaacgtctgaatcccttgtccgggccgtcccacggcggccctccccctaccggagtgaaccgatgaactggctggatatctgcgccctcgatgaaatcaacccgctgggctcgcgcgtggtcgccggcccgaaaggcgacatcgccatcttccgcgccgccgacgaccaggtcttcgccctcgatgaccgctgcccgcacaagggcggcccgctgtcccagggcctgatctacggcaagcgagtggcctgtccgttgcacaactggcagatcgaactggagagcggcgaagccgtggccccggaccagggctgcgcccatcgccacccggtgcgggtggagaacggacgggtgctgctcggcctggacagcgtggcgctgtgcgcctgatctctcgccgataacaggagccgagcatgtcgacagattccccgctgcgcaccaccgcttcgacctgctgctactgcggcgtgggttgtggcgtcctgatcgaacacgacggcgaacgcatcctcggcgtgcaaggcgacccgcggcacccagccaacttcggcagactgtgcagcaaaggcgccagcctgcacctgaccggcgacctccaggcccgcgcgctgtacccccaactgcgcctcggcaagcaactggcgcgggcccgcagcgactgggagagtgccctggaacatgccgccgggcgtttcgccgagaccattcgcgaacacgggccggacagcgtggccttctatatatccggccagttgctgaccgaggactactacgccttcaacaagctggcgcgggccctggtcggcaccaacaacatcgacagcaattcgcgcctgtgcatgtcctcgacggtggttggctacaagcgcagcctgggcgccgacgcaccgccgtgcagctacgaagacctcgactgcgccgattgcgtgctgatcgccggcagcaacatggccttcgcccacccggtcctgttccgtcgcctggaagccgccaaggccgctcggccggagatgcgcatcgtcgtgatcgacccgcggcgcaccgacacctgcgagctggccgacctgcacctggcgctgcttcccggtaccgacgtcgcactgttccacggcatcctgcatatcctgctctgggaggactggatcgaccgttcgttcatcgccgagcataccgagggtttcgccgacctgaaggaactggtgcgcgactacaccccggccgccgtcgccgacatctgcggcatcgaccgcgccgacctgcagcgctgcgccgaatggatcggccgttcgccgcgcttcctttcgctctggtgcatggggctcaaccagtccagcgccggcagcgccaagaacagcgcactgatcaacctgcacctggccaccggcaagatcggccgcgccggatgcgggccgttttccctcaccggtcagccgaacgccatgggcggtcgcgagaccggcagcctggccaacctgctgcccggccaccgcgaagccgccgatcccggccatcgcgccgaggtggcgcactactggggtgtggaacagttgcccacgtcccccggtctcagcgccatcgagctgttcgatgcggtccacgacggccggatcaaggcgctctggatcgcctgtaccaaccccgcgcaatcgctgccggaccagcgcaagatccacgaggcccttgcccgctgtcccttcgtggtggtccaggaagccttcgccggcacggaaacctgccaatacgccgaccttttgcttccagccgcatcctggggagaaaaggaaggctccgtgaccaattcggaacggcgggtcagtcatgtccgtcgggccgttccgccccccggggaagcacgccaggactggaacatcgtctgcgacttcgcgcgccgcctggaagggcacctgcggcccgctaaacccggcctgttcgcctttgccgacagccgcagcctgttcgacgaatacaagctgctcaccgccgggcgcgacctcgatctttccggcctcagctacgcactgctcgaccgcctggggccgcagcaatggccatttcccactggcgcggagcacggcaccgcacggctctatgcagacggccgcttccctaccgcctcgggacgcgcgcaactggtcgccgaaccctaccgcgccgcccaggaaaaacgcgacgcgcgctacccgctgaccctcaataccggacgcttgcgcgaccagtggcacggcatgagccggaccggcacctgcgcacgcctgttcggccatgaagaggaggccctggtgcacctgcatcccgaggaactgcgccgccgccaactgcgggacgggcagctcgtgcgcctgaagagccggcgtggcgcgctggtcctgccggtgagcgcagacgactcggtgcgccccggccaggccttcctgccgatgcactggggcgatcgcttcctcaagggcctgggctgcaatgtcctgaccctgccggcgttcgaccccctgtcgaaacaacccgaactcaagcacgccggggttcaagtcgagtccgtcgaactgccctggcgcctgttcgcgctggtggaaaccgatatccaggcgcgtttcgaggccctccgtgcgctgtgcgaagtcttcgaccacgccagcttcagtctcgccggacgcgagcgccccgccctgctggtcagcgccgcacaccatgaggcacctggcgcagacctgctggagcggatagatcgccaactcgaattgctcgacgggccgatcctcgcctacgacgacccacggcgcgccatcggcaagcgcgtgcgcctcgaagacgggcgcatcgtcgccgtccggctcgccggcgaaaccctcgcccgagactggttgaaagagctctggcttaccggccgggccgatagcgagctacgccgctggctgctcgccccactcggcgcggcaccgggacgacccagccagggtgcgggcggcaagaccctgtgcagttgccagaacgtcagccagcaaacggtgctcggcggcatcgcccgcggattggacctggacggattgaagcgcgagttcggctgcggcaccggctgcggctcctgcgtaccggaaatcaagagactgctggcggccccccggcccatggcggcgaatgcctgaggagaacgacgatgagcggtaaggtctggctggtgggtgcgggtcccggcgatccggaactgttgaccctgaaggcagttcgcgccctgcaggacgcggatgtggtgatggtcgacgatctggtcaacccgagcatactggagcactgtccgtccgcccggctggtccgggtcggcaaacgcggcggctgccgctccacaccgcaggacttcatccagcgcctgatgctgcggcatgcccgccagggacgcagcgtggtgcgcctgaaaggcggcgatccatgcatcttcggccgcgccggcgaagaagccgaatggctggcccggcacgggatagacagcgagatagtgaacggcatcaccgccgggctggctggcgccactgcctgcggcataccgctgacctaccgcggcatcagccgcggcgtgaccctggtgaccgcgcatacccaggacgacagcccgctggcctgggaagccctggcacgcagcggtaccacgctggtggtctacatgggcgtcgcccgactcgcggagatccaggccgggctgctggctggaggcatggccgaggatacgccgctggcgatgatcgagaacgccaccctgggcaaccagcgcgaatgccgcagcaacctcggcgagctactgcgggacgccggacgtttcgccttgaaaagcccggcgatcctggtgatcggcgaagtaacccgcgacatcgtgtcgcaaccgatttccctgagcgcctgacgagcggtctttttccaggcaaagaaaaacccggcctgggccgggtttttccttagaggctcagccgattacttggcttcagcttctacttcggcttcaacgcgacggttgatagcgcggccttcagcggtggcgttgtcggcaaccgggcgggactcgccgtaaccaacagcgttcacgcgaccaccttctacaccgtactcgttgaccagtacgtcacgaacggcgttggcacgacgctcggacagcttctggttgtaagcgtcggtgccgacggagtcggtgtgaccttcaacggtggtggaagtggacgggtactgcttcatgaagtcagccaggttcttgatgtcagcgtagctgttctctttgaccttggacttgtcgaagtcgaacttcacgtccagctgtacgcgtacgacttcggcgacagccgggcagccgttggcgtcaacggtgacgttggccggggtatccgggcacttgtcgacgttgtcgcaaacgccgtcgttgtcggagtcggagcaaacgtcggcaaccggttccggagccggagcggctttcgaaccaccgaagttgaagccgacgcccaggccagccatccactcgccctggtgaccgttgtcacgcttctccagaccgtactggccgtcgaggctggccttggcgaagaagttctcggtgaagtagtacttcagaccagcgccgatgttggccatggtcatctgctgacggccttggctgtcgctgttgatgttggtgatgttctggtgagccagaccagccgacacgtacggacgcagacctacgcccggggtaccgaagtggtagatggcgtccagggaggtcaggttgccgtggaccttcttgttgccggtttcgtaggtgccacgaacgtcatggtactcaccgtaggacagcgccagctcgacgtcgtcggtcaggaagtaaccgatcgagccgccgtacaggtccgcgttcttcatgttgcgaacgctgtcggtgaagtagcgcttgccgaaggcttcgatctctaccgagttctggccctgggcaaaggcgttcattgccgaagcggcaaccagcgagccgatgacaacgcctaaggtgttcttcagtttcatccgttaaatccccatcttgatggtcagttagttgtccaacaatcagccgcacaacttgggtggcaagtttatcagaacttcccgcatagagagacaatatttacccaactatgtttcggtcgcatctgaaaacttttcgcgcaggcggtccagtgcccgcttgtagcgcattttcgtcgcactcagacccatgtgcatgatatccgctatctcctgaaactccagttccgctacgaagcgaagaaccagaatctcccgatctatcggattgacatggacgagccaacgatccaatccgccccgctcctcaaccttcggcgacttctcctcggaagcctcctccagcgggtcgaggctgagcgcatccatcaatcggcgcttgcggcgctccttgcggtactgcgtgatgcactcgttgtacgtgatgctatatagccatgttttgaacttcgacttgccctcaaagttcttcaacccgtacaaaactttcagcatcacctcctggcacacgtcgtccgcgtcgcggtcgttgcccaggtagcgggcacagacgttgaacagcgtgcgctggtaacgccgcatcaattcttcataggcgcgcgtcacgtggaacagctccgagtgcgcacgctcgaccagctcttcatcggaaagctggcgtgggtcataccgctgtgacagggggtgaggcttattcaagtgagatcaggccagtcatatcgtaagccgggccgccctgcagagcagccacgtccattatctctcccggatcagcggctggtaactcgctgatcgagcagtagacggttggccagcgacacaagctctccctcttccgtcagcaggatggtcttgaccgtacctatctcttcaatagtgccttcaacgtcacccactttcacctgttgtccgacctgatacagctcgcggacgtagattcctgcaatgatctgcccggcgacctcgcggctgcccaggcccagggccagcgcagcggccaggccgacggtgatcaggacgatggcgatgatgtagttgagcaggtcggtcttgacctcgagctgccccaccgccaccgagatgctgatgatgatgaccagccactgggcgatccgccccaggccgttcgcgtattcgaggccgacgccgtccgctgcgccgcgcacgacgctgttcaccagttgcgccaggagcacgccgacgatcagcaccagggccgcgccgaacaccttgggcaggtacagggcgaggacgtccagcgtggcggatacccgctgcaggccgagcgactcggcggcggatacgaggaagacgagcagcacgaaccagtagacgatcttgccgaccagcgtcgagaccggaacctggataccgacccgggccagcagcttggtcaggccggtgccacccatcagccggtccaggcccagcttggccagcagcttggaaagcagcgcatcgagcagcttggcgatgacgaagccgagcagaacgaccaccagggcgccgagcaggttgggaatgaagcctgccagcttgccccacagggtgttcatcgcggtcagcaagctctgggtccagatatcgaattgcatgttcactcagccttgtcagcagaagatgcgtttttcgcggaaatacgggaaaccggcgccagatgcggcgaaccgttgttgatgccgatcatcagcgcctgcagccagtgccccatgaggctgaacaggtcaccggcgccgacctggcgattggcggtcttcagcacccgtcccagacgcgcgtcgtcgtccggctggggagccgaagccttgagcaggtcccgcagggactcttcgaacggatcgtgcatgcgcacctcatgtctgtacgagggagtgacgccctctcctcactccaggtcacgtcagagccagcgcagccgacgaaatacccaccactggaaggtggcgaccccgccgatcagcaggcaggccagccagaacccatgcggtgcatccgcccctggaatgccgccgacattgattcccagcaggccggtgacgaagctcatcggcaggaaaaagccggtgattataccaaggagatacatggtgcggttcatccgttcggtgattcgccgcgactcggcttcctgcaggacgctgatgcgctcccgtatcaactcgagttcttcgagattccgcgtcagccggttgttcagctcgttccagtaatcggcgtcgtcctcgacgaaccaggacagcttgtagcgcgccagttgcgagtagatgtcccgctgcggcgccaggtagcgccgcaaccccgccgaccggcggcgcagggtacgcaactggtgctggtcgggactggcgcgctcgtccgcctcgaccagctcctcgacagcatcgagctggtcggctatcccgctgatcagcgtgtcgacgcgatcggtcaggtagtgcgcgaggtagtacacgacctcggatgctgtcttcggccctttccccgcctccaggtcctcgagcagatcggccaccgccttcagcggccgcaggcgcagcgagatcacccggcgcgcgtcggcgaatacccgcagcgaaaccatgtcttccggctccgcgcccggattcaggttcactccacggaggaacaccagcaggctttcggccccgagatcgagcaaacgggggcgggtcgcctcctccagcagcagatcgcaggcgaactcgctgagccccgcggaatcccgcagccaggcctgtgcctccggtacgccgcggtcccagtgcagccaaagactttcctccggcagcaggtcgagcaccgctatctggttgcgtccgacacggcgtccgccgccgcgcccgttgaggacgtagccatagatcaggccgcgctcgtcacccgactcgtacgcttgcattgcgcttcccttggtaaaacgaccatttcgacagtaaaaacacaagtccagtaccagtcaattcatggacttgcggcacaaccttaaagccagtcctgagacccgtatgcgcaccccgggttcattccagcaaaaagccccgggacgctgcctgcgtcaccggggccggaacggctgttaaaaagccctattcgggcatcttcaaggcctgcggagaaacgatgatgccgttgttgtcggcatacacgaactcgccggggcggaaggtgacgccgccgaaggtcacggcgacgttcagatcgccgatgccgcgcttgtcggtcttcagcggatgactggccagggcctggacgccgaggtcggtctgggcgatcacgtcgacgtcacggatgcagccatacacgacgatcccttcccagccgttcttcgccgctttctcggccagcatgtcgcccagcagggcgcggcgcagcgaaccaccgccatcgacgaccaggaccttgcccttgccgtccttgtcgacctgctccttgaccaacgagttgtcttcgaagcacttgatggtgacgatctcgccgccgaaggagtcgcggccgccgaagttgctgaacatgggttcgacgacctggaccagctcaggataggcatcgcacagatcgggagtgacgtaatgcatgggaagctcctgtgggtgaagggatcggctcgggcagctccggaggaacatcggccgcccgccccggcggcgccggcgtgaccggagccgccatttgcgtcacatgttagccgctgattccggcttccgatacgtctagcgcctcgctccacgcggattcgtcgcccgccggcgatcgctggcgcagccagcgctccaccaagggccagacctctagctgggccgccttgccgatcagcatctcgatatgcccgtagtcctcggcgtagccagcctcgcgtccgagcaacaggtattcgcgctcggacgaggcgaactgctcgaacaacttgcgacaggcccaggacgggtcctgccggtccccagccccggcgaccgccaatagcggtacgtcgactgcggcgagccccttccaccagtcgttgcccggctcgccgaagcggccgaacagcccatgccaacgcaggacctccagcgccaggccgaccggctcgtcttccggcccctgccgccaacggcttccggacagcgcatcgacgcggcgcagcagcaggcgcgcgaggatgcctgccatgggcaacctgaacagccagtgcgcggtgctgacctggctaccgaacaacgccacggaagcgatccgcgcctggtccaggtagcccccgcccagtcccgccgccagcaccaccccaccgagggagtggccaatccagtgcgccggctgcccgcactgctcgtggatgaaggaggccagcgccggcaggtcgtagcgcgcgtagtcggcgacccggttgtcccggtaaccatcgttgcgaatcgacaggccatggccacgcatttccggcagccagacatcgaaccccgcccgcgccaggtaaggacctaatccgagcgcacgcggcgagtaccagaagcggcggttggaaaaactcccgtgcaggaggatcacaggcggtccgcgccgctcgccggcggcctgctgtccgagccgggttacgaccagctcgacgctggcatcggggctgttgccgggcttcaggcggtagatgtcttcggtaaggtcggcgcgcaattcggcgctgaccagggcgacaggaaagaggcggctactgctttgcatgcttgtcttgtacaggaggcacgaaaaagggcggtgttacccgccctttccggatacagcgaggaccgatcaggcctggtcttgaccctcggcgaggaagaaccaggtatccagcaccgagtcggggttcaacgagacgctctcgatgccctgctccatcagccagcgggccaggtccgggtggtccgacggaccctggccgcagatgccgatgtacttgccagccttgttgcaggcagcgatggcgttggccagcagcttcttcaccgccggattgcgctcgtcgaacaggtgggcaacgatgccggaatcgcgatccaggcccagggtcagctgggtcaggtcgttggaaccgatggagaagccatcgaagaactcgaggaactcgtcggccagcagggcgttcgacggcagttcgcacatcatgatgaccttcagtccgttctcgccgcgcttcaggccgttcccggccagcagctcgaccacctggctcgcctcgcccagggtgcgcacgaagggcaccatgatctcgacgttggtcaggcccatttcgttgcggaccttcttcagcgcacgacactccagctcgaagcagtcgcggaacgactcgctgatgtagcgcgaggcgccacggaagccgagcatcgggttctcttcttccggctcgtagagcttgccgccgatcaggttggcgtactcattggacttgaagtcggacaggcgcacgatgaccttcttcggccagaacgccgcggccagggtgctgatgccctccaccagcttctcgacgtagaagccgaccggatcgggatagccggcgatacgcttctccacgctttccttgatgtccgccggcaggccggcgaagttcagcaatgccttggggtgcacgccgatcatgcggttgatgatgaattcgaggcgggccaggcccacgccttcgttcggcaactgggcgaaatcgaaagcgcgatcgggattgccgacgttcatcatgatcttgaacggaaggtcgggcatggcgtcgaccgagttcttgcgcacatcgaaaccgagttcaccttcgaagatgaagccggtatcgccttcggcacaggaaacggtcaccccctggccatcctgcaggatctgggtggcattgccgcaaccgaccaccgccgggatgcccagttcgcgagcgatgatcgccgcgtggcaggtacgcccgccgcggttggtgacgatggcgctggcgcgcttcatcaccggctcccagtccgggtcggtcatgtcggagaccaggacgtcacccggttggaccttgtccatttccgacacgtcgttgatcaccttgaccggaccggcaccgatgcgctggccgatggcacgtccttccaccaggacggtccccttctctttcagcaggtagcgctccatgaccgtggcgctggcgcggctcttcacggtttccgggcgtgcctggacgatgtacagcttgccgtcgtcaccgtccttggcccattcgatgtccatcgggcggccatagtgcttctcgatgatcatggcctgcttggccagctcggtgacctcggcgtcgctcagggcgaagcgggcgcgatcggcgcgatcgacgtccaccaccttgaccgagcgaccggccttggcttcgtcgccgtagatcatcttgatcgccttgctacccaggttgcggcgcaggatggccggacgcccggcttccagggtcggcttgtggacgtagaactcgtcggggttcaccgcgccctggaccacggtctcgcccaggccgtaggcaccagtgatgaagaccacgtcgcggaagccggattcggtgtccagggtgaacatcaccccggcggtgccggtttccgagcggaccatgcgctgcacgccggcggacaaggcgaccagcttgtggtcgaagccctggtgcacgcggtaggcgatggcgcggtcgttgaacagggaggcgaagacctcttttgctgcgcggatcacattgtccacgccgcggatattgaggaaggtttcctgctggccggcgaacgaggcgtccggaaggtcttcggcggtagcggaggaacgcactgccacggcgaggttgtcgttgccgttggccagggcggcgaaggcctggcggatctcgctgtcgagacgggccgggaactcggcttccatcacccactggcggatctgcgcgccggtcttggccagggcgttgacgtcgtcgacgtccagggcgtccagggccgcgtggatacggtcgttgaggccactctgctcgaggaagtcacggtaggcctgggcggtggtggcaaatccgccgggtacggaaacgccggcaccggccaggttgctgatcatctcgccgagggatgcgttcttgccccccacatgctctacatcatggacgccgagcttatcgagggaaactacgtactctaccaaggtgatctctccactattgaattggaaaagctcaagcggggccaggagcagctccgctggattctggcctggcccttagaaataagtgacaatgctgcgacagaaaggcctctgacaacgcgcggcctatcatagccaagaatcgttcctaccttaaggctttcggtgcaaatgaaacgaaccgcattcttcatctcggacggcaccggtatcaccgccgaaaccctgggccaaagccttctggcacagttcgagaacatcagcttcgtcaaactgacgagaccgtacatcgataccgaagaaaaagcgcgcgccatggtacagcaaatcaataatgctgccgagtcggacggggcccgcccgatcatcttcgataccatcgtgaaccgcgacatccgggcggtcctggcgcaatccaacggtttcatgatcgatatcttcgccacctttctttcgcctctggaacaggagctttcggccgactcgtcctattcggtcggcaagtcccactccatcggccacaactccaactacatggatcgcatcgaggcggtgaacttcgccctcgacaacgacgacggcgcccgcacccactactacgacaaggccgacctgatcctggtcggagtctcgcgctgcggcaagacgcccacctgcctgtacatggccctgcagtatggcatccgcgccgccaactacccgttgacggaagaggacatggagcgcctgcaactgccgaacgccctcaagcagtacaagcacaagctgttcggcctgaccatcgaccccgaccgcctcaccgcgatccgcaacgaacgcaagcccaacagtcgctacgccagcttcgcccagtgcgaattcgaggtacgcgaggtcgaaagcctgttccgccgcgaaaacatcgcctacatcaactccacgcatttctcggtggaggagatttccgcaaagatcctcgtcgaaaaaggcgtggaacggcgcttcaaataaccgctccggggccagcggctcggcaccgccaaggtcccttgcccgcttccggtaacgcttcgagcccctggatggaatttcgtttcatcccaggggcaaaaccccgaccaagtggtataagcggctgtcgctgccgaaaaaccgcgtgatagaatgcggcccgcatgcgcctggcggggcgcccggcatgcccggcctgccgagcgcaggtcgatgacgcagggttttccgtcacggactggacagcgatcgcaagatcgacccgccgaacgcgacaccaaccaggacttatgaaactcaagcccttagctcccctgctctgcctattcatcgccgtaccaggcctgagcgtagccgccgaaaagacggtctacggcctgaacgaatacgcgcgcatcaacgacccggacatccagctggccgccaagctcgacaccggcgccaagaccgcctccctcagcgcccgcgacatcaagcgtttcaagcgcgacggcgaaacctgggtgcgcttctacctggccaccgacaacgccgacgacaccccgatcgagaagcccctggcgcggatcagcaagatcaagcgccgccacggcgacttcaaccccgacgagggcaaggcctataccgcccgtccggtgatcgagctgcaggtctgcatgggcaaggcgattcgcaccatcgaagtgaacctgaccgaccgaagtgcattccaatacccgcttttgatcggctcggaggccttgaagaaattcgacgcactggtcgatccgagtttgaaatactcggccgggaaacccggctgcaaacctgatgcaaaacctgctgagtaaacgacatgcgctctctcaacctgcatctgaaagtcctgatcgccatcctgctgaccctgggtgtggcgatcaccgcctatcagattttcgtccagggtattcccgttaccgaagccgaaaccgatgacctctggaacatcgatgccaaggtcgacttcgtcgccacgccgaaaaccccggtcaaggtgcagatgttcgttccgccgttgagccaggactacgtcagcctcaacgaaagcttcgtctccaacaattacggcgtcagcatcaatcgcgccgacggcaatcgcaaggtgacctggtccgcccgccgcgccaacggcaagcagaccctgtactaccgcctggtgctgaccaagcgctacaccggcgagaagaccaaggagaaaggcccgatcttccgcgacagcctgcccctggaaggcccggagaagatcgccgcagaagccctgctggcccccattcgccagcactcggccgacgtcgagaccttcgtcagcgaagccatcaagcgcgccaacaacggcaacgacgacaacgtcaagctgctgatggccggcgacaccagcctggaaaagaaagcgcatatcgtcgagaccctgctgtccatcgcccacgtgccgatggagcgggtccacaccatccgtctggtcgccgacctgcaacagagcccggaactgtggctgcgcagcttcaacggcgagaactggctgtatttcaacgtggtcaccggcgaacagggtctgccctccgatcgcctgatctggtggcttggcgatgagccgctgatgaccatcgacggcggcaagaaggcccaggtcagcttcagcctgaacagcagcgagatgaacgccatccgcctggccaagctgtccgacgagaacaccgaggcggccttcctcgagtactccctgtacggcctgccgctgtccacccagcagaccttccagatcatgatcatgatcccgatcggcgtgctggtgatcctgatcctgcgcaacctgatcggcctgcagacccttggcaccttcaccccggttctgatcgccctggccttccgcgagaccggcctgcaatggggtatcgccctgttcaccgtgatcaccgccctgggcctgtcgctgcgctcctatctcgagcacctgaagctgcagatgctgccgcgcctctcggtggtgctgaccttcgtggtggtgatgatcgcggtgatcagcctgttcagccacaagctcggcttcgagagcggcctgtcgatcgccctgttcccgatggtgatcctgaccatgaccatcgaacgcctgtcgatcacctgggaagagcgcggcggcggccatgcgatgaaggtggccatcggcacccttttcgcggcatcgctggcgcacatcctcatgcgcatcccggaactggtgtacttcatcttcaccttcccggccgtgctgctgatcctggtcgccttcatgctcgccatgggccgctaccgcggctaccgcctgaccgagctgttccgcttcaaggccctgctcaaggactgaaccatgtcgatctggaagacctggaaagacctgaccgcgaaaggcgtgatgggcatcaaccgacgcaatgccgattacgtcctgaagtacaacaagcggcacctgtatccggtggtggacgacaagatcatcaccaaggaacgcgcgctcgaggccggcatccacgtgccggagatgtacggcatcatcgagaccgagaaaggcatcgacaagctcaacgagatcatcggcgagcacaacgatttcgtcatcaagccggcgcagggcgccggcggcgacggcatcatggtgatcgccgaccgcttcgagggccgctacaagaccgtgtcggggaagatcgtcagccacgaggagatcgagcaccacatctcgagcatcctctccggcctctactccctcggcggtcatcgcgaccgcgtactgatcgagtaccgggtgacccccgaccagatcttcaagagcatcagctacgaaggtgtgccggacatccgcatcatcgtactgatgggctacccggtgatggccatgctgcgcctgccgacccggcagtcgggcggcaaggccaacctgcaccagggcgccatcggcgtgggcgtcgacctggccaccggcgtcaccctgcgcggcacctggctgaacaacaagatcgccaagcacccggacaccaccaacgcggtggacggtgtgcaactgccgaactgggacggcttcatgaagctggcggccggttgctacgagttgtcgggcctcggctacatcggcgtggacatggttctcgaccaggagaaaggcccgctgatcctcgaactcaacgcccgcccgggcctgaacatccagatcgccaacgacagcggcctggtgcaccgctgccacgccgtcgaggcgcgactggaagaactcaaggcgaaaggcatcgaagagtccgcggaagagcgcgtacgcttctcccagcagttgttcggccacgtccagcagcaccagggctgacgtgcttccgatatgaagaagcccggctccggccgggctttttcatgtctcggatttcaacgcaccacggccagctcgaagccgccctgccgggcgtgctcatgcacctgcatgcccgcctcgttcaccgccaggccctgtagcggacgcttgaacggcttgttgtcgagggtttgcagcgagcggtcctcgtcggtggtcagcagcagcacgtagcgctcgccgcgattggcccgcaccggcaccgtaccctcgatgaaagcgtagcgataccaggtttccgggttcagcttgtacaccgcgtcgctgaccagccgggtcggccgcttgtgctcgtcgaggaacagcagcgacgggtagaccacctggcggttggcgaaactgcggatgcgcaggccgtagacaccctgagagcgcggcagccggatcgccgcgtagaagctcctgcccatgggaaagtcgaagctcggcgagaagcggttcaactcctcgtagcgcggttcgtcggcatccagttcggtgaagtcgctctcggcgatctgctcgcagcagcgccgttgcaggtcctggtagagatcgtcgatggtcatctcggtgcccttgagcaaagccttcagcgcatcgctctgctggccggcgccatccagcccgggcaacgccgccggacgctgcttgaactcgatctgccggccctcggtgaaggcgatctgcgacgaaggcgccgcctcccgcttgaagcgcgccgcgcgctcctcgggcgggatctgcgagttgtgcatgcggcccttctcgtccacccaggtgtagtagggactgccgttctcgctgcgaacgaaacccttgccctcgaaggcctcggcgtcgatgtattcggcggagtgttcgccgttgggcaggacgtagtcggcgcgctggccggcgaccttggcgccggcatagaagctgttctgcacgttgccgttggcatcgatccaggtgtagtagcgacgcttgctctcccctccgctgctgttccccggccactgcgtggcgttgtccgccttgttcagcacccgcgcctggtcgctctggccgatacgctgtcgcgcctggcgctgctggcggtcgaactggccgtcgacgaaggtgttgtgcaccccgccattgtcgtccacccaggtcaggtagcgcccgccggaggcccagcccggcgaagatgccggcagcgccagggagaagacgcaaagtacgatggatgcgcgcatcatgctccagccctcagaaggtcgtacggtaggtcatggcgaaaatataggctttcaccgtggtgtccacgtccagtcccgcgtaggggttgtacaccaggttgtcgagcccggtgcagttcaggttgcagctggtatcggccttgacgctctgcttggtgacgaagtagttgaaaccgacatcgatcaccgtgtccttgtcccactggtagcccagccccaggccgtagagattggcatcgccgatcggcaccaggatgtccgcctggcccttggggatcgccgaaggccggtattcgtagccggcgcgtagctgcaaacggtcgttgacgtcgtactgcacgcccatggcccagctccaggtatcgcggtagccgcggtcgagggtgatgctgtggctggtggcgtccttcgagtcgaggtacttggcgatgcgcagcaggtcaagctcgcggtcgaactcgatcttgaactcgttccagtcgctgtagccgttccatttcaggtcgaagttgaattgccacttcttgaacgggcgcagcttcacgccggtggagaaggcatccgggtagaccatgttcatcgtggcgttgccatgctcttcatcgacgttcccgtaggggaacatctggccgaggatcgcaccaccgagcgacttgtgcaccccggtccagaaaccctgccagccttggccgtagtcgacccggtacttgcccttgagcctcatccgcgactcgctctggtaggtcgcgccccaggcgaaccagtcggtgggctcccagagcacgccgaggttgaagctgggcgacagcgactgctgcatgtccaggtcgatattggccaggttctggaacggaccgatgttgccgccgcagacgttgaagaacacctcgaggatctcctgcattcccggcaggcaaccgatctccttggtctgctgcaacagcccgagcaactggttcggcgcccggaaatcctcgttcaacgctactgcctggtgggaaaaacccaccgacaggccgaccgacagctcgtcgttgacctggtaggccagggtcggcgagaagtaggtgagccgctgcaacgacacctcgcgtccctggtagcgcgccggatcgctatcggaatcgcggctgtagcccagcgcttgcggggtatagacgttggtggcgaaggtgaacttggagcccggcgggttgatcgagatcccggccagcggcgccaccagcaacggcacgtcggtcatgccgccgaggccgggcaggtacatggtcggggtcagggtccggctgtggctgttggcgaccgggtcgtcgcgcaggccgaaggtgccttcgccgtagttcggcggcgccttgaagccggcgcggatgtccatcacccctgtaagcagcttcacggtcgcctggcggcccttcatcctggtcagcgccgccgggttgtagtgcaccgaatcgatgccggtctcgtcggcggtcacggcgttgccgagggccatggctttcgggttgccgatggtcaggtcgttggccatctgcgcgccggccggcggaatccaggccaggcacacccctgccagcgccagccagagcggcgcaatgcgcatcttcataacaggcctcgctcgcgggttactgggccttcagccctttgatatcgaggggtacggataaccccagcagtacatccggcgagtcttccgtgaggccgaaaccggcgttgacgttgacgatgtagtccggtgacgtccgcaagccgagcgagaagttcatgatgctactggtctgttcggacgactcgaacgtaccggcagtggtgtggtagcggttcttcagcgtgtaggccatctggtacgaggtcgccagcgagacgtcgtaggacagcgcgtaggccatgcccatgttgaagttgatcgtgttgccgggcgagaccttctccagctgggagttgtcggccagggtctggtgcacgtcgtccaccggcaggttccaggtgtagccgagcgagccgtagaggaccaccgggtcgatcacataggacatgttcgcgccgaagcccaggctgtagtagccgttgccggtggagatgtccttgtccaggttggtcttgtagggactgtcgccggtcggcaggccgatggtggtatacagcgtggtgaccggccgcccgcgcaccgccgcccagggctgccagcgcaaggtcgcggaaacgtcgccgaggctgtaggcgtgggtatccatctcggtgtcgtacttggctaccagcggcaggcggaaactgaaggtgaggttgtcccagatcccgtagtcgaaggtgaaggagttggtgaaggtgtgctgggactggctctgccggccggcgaggccgtagatctgcgtgccgccgctggtcttggtcagcggcaccagggtcagccgctggtcgcgcaccagcgcgtagtcgaaaccgtaggtcagggtccgctcgcccttcttcagcaaggtgtagctcttctcggcggcctggaagacttcctccagcgccttggcgctgtcggcatcgtcattcttcttggccagcgcgtcacgggcctggtcgaccgaggcttcctcggcaacggacaaaccgctgatagacagcatcagcgccgccgcgcatgtgtaccccctgattctcatggcgctatccccagagattgttcttgtttttgggtatctgctacttggtgcgcaggtgtatgacgtcgccaccagtgcccagctcacggacctggttttcagtgatcttgttgatctgcggaaactcgcggaacgccagcaggctgacggtgcggtcgtccaccaggcgcatgtcgcgatcgttcagcgccagcgcgttgcggggctcctgcccactcgggaagatcacgaacaggacgttctggtcccagatttcctcgaagcgcgtccgggtgaagctgatgttgcccaaggccggatcggcgacgaagacgtgatcgttgtagacatcgcgcaccaccacgaaatgcttgaagccggcatagtggatggggaccagcgccggatgctcgagagcgtccaggtcgctgaactcggcgcgaaaaccaccgctcttgtagcccagcgcagcggcgtagcgcttcatgtcgagcagcgagaaaccgcggcgctgcacgatcttatcggcctcgccatagcgcagcagcccttccatgacctggcgttcctcgaggttgcgcccgaggtagtagtccagcagcgtggtaagcgccgccgagccgcagctgtagtcataggcctggcggatgacgttgcggaactgcaactggctcatcggctccagctgcaccgattcgcggtagggtccattgggggtcagaggctggctgaggttgaccgtgccctgcggttgcggcttggtatcgaccgtctgggtgaacccgaacagcccgatcagacttcccagcaaaatctcgaacatcgccccgtcgtacctctttcggagaaagaccccgccgatgcctcgacgaggtcttcgcgtctcgactcggttcctggatcagtgaccccagaccttgatggtggaaccggccatgttcagcccggagacggtcagcgagccgatgctggcggcgctggtgtcgcccaccttgatggcgccaacggtcacgtcgccggtgatggccggcaggccgatggccagttgctgggtcgacttgccgccgatgtcggtggtgacgacgtcgatggtcagcggcttggtatcgtcgatggtcagcgccggcaggctgatgttctccagccgcagggagccgccgttggtgtcggtatcggtgtaggtcacggccccgacggagccctggaaagtaccggaaatgctgatgcctgcctggccggtcacgtcggacagcgcgccatcgtccatggctttcaggtcggcatgcgccagcaagggagcagccagaacagcagttgcaaggaacaggtgctttttcattgttatttctccagtgttcaggtgtggtttgccccagggcactgccgtttgcatcctgtccccggcagatcgaccggcatctcgccggtctccaggtccggtactgcttccctaggtgtcccggacatggattcggtagagcctcatgctctctcgtcctggattccaagctactgggccaccccttccgccgccagcccatccaagggatggagcgatggcggctgccgctcacgcctcgctcagcagtcccaggcttttaccctttagtacggcttgcgttctgctcttcacacccagcttggcgaacaggttgtgcaggtgccacttgatggtggcttccgacaggtgcaccgcctgcgcgatatcgcggttcgacaagcccgccgccaccagccgcaggatttcccgttcgcgatggctaacatcctgattttcatcgaaactttccgggtccacggagagcttccggcactgctcgcggagcaggtcggccagcccctgccaggccgcggcacgcttgggctccgcttccctccagctttcccacatcggcaacagccacaacgcgtcgtcctggaacagccggcgatagccgagattccaggcttcctcgagcgtggcgaggaacaggccgatggctttttcgctgttacctttctgccaatacgccacagaaagtaacaaggacaaacgcagccgccgatccctctggtaagcggaagagtagccggccagacagctttccagcttgctctgcgcgcgttccgcgtgacgctcggacaatgccagccgagcctccgccaggaccagggcggtctgtgcgtcggcatgccgctcgccggagagcccggcaagatgccgctccagttgcaggcagacccgttcggcctcgttcggacggcgcagccacagcaggaactgcaccttgcagctcatggcgtgagcatagacacgctcgtagccgggcgagagcagaccgctcagccattcgtcgagttgcgccagcccctgctcggcggcgccggagaagaagcgcgccttggccatgaccaactggccgcgactgagcagttccaccggcgtcgcgacatcccgccagaccgtcgccagcggtagttcggcgagcacgccggcatgccggtcctgctcgtagagcaggtcggcataggccagcgacaagggtccgccgacccggctgcgccggccgaatacctgctcgacccggttgcgcgccgactcggctatcgccctgccccgctccaggtcgccactctccttgcagatcagggattcgatcaggctggtcaccacctgcaggtactcgctgtcggcgactttcaggtcctcccgcgcggaaccgatggcgccggcggcctcggcgtagtcgccgagcagcgcatgcgccgaagcctgcacgcagagcaggctggcgcggaacaccggctggttgctcgggaccatggacagccagtgacgggcgaccttcaggcaggcttcgagcttgtcctggtagagcaacaccagggccttgagcacctgggcggcggcgagcaactcgccgagcccgaagtgcatgaccttgccgcgcccctgcaagaggcggtggctgacctcctcgatcaacgcctcggcctcggcgaagcgttgctcgaacgccagttgccaggcgtagaagatctggaacaccggatgctcgcggatcacctcggcgggaatgccgttgagcatgccgaggatgccgtacacccggttaccggcgatcaggcgcgcgccctggcgctccagcaactcggcggcgaacaggtagtcgcgggcgcgaagggcgtacttgatcgcccggtcggccaggtcgcgcccctcgcaccagcgcgccgccgcatgcagcaacggggtcggatcggcatgccgggacagccgcccctggaggaactcggcgaacagatggtggtagcggaaccattcgcgctggtcgtccagggcgatgacgaacaactgctcgttctgcaggcgcatgagcatgtccaggccgtcgcgacgcccggtcagcgcattgcacagttccgcattgaactcatcgagcaccgaggtctggtcgaggaacagctgcaggtcggcgggcaggctggccagcacgtcttccgccaggtagtcggcgatgttccgttcggtcccggagagcccgcggaggaaaccttcccggtcggtattgcgactgagggccagggccgccaggtgcaacgccgtgatccagccttcggtgcgcttgaacagcagcttcagctcgcgctcgcccagctccagccccttgaggtcgaggagaaacgcatcgctctcctcgcgcgaaagtcgcaggtcttccgcgctcaggcagaaggtccagggcttgagggtcggttcgtcgaccaggaagcgcgggcggaagcgggtcgaggccaccacccgcacgtgatcgggcaggttctcgatcaggtagcgaaccccatgcggcaaggcggcgtggcggatgcggtggaaatcgtcgaggaacaggtacaaggggccttccaggcgacgcaggtcggcgaggaaggcatccaggataccctccagcggcaccgcgacgtcggtgccgagcagattggcggtattgccgccgaatgccgggaccactcgctggatgctcgccagcaggtactggatcagacgctgcggttcgctgtcggtctcgtcgcaggacagccatgccaccgccgcgccctgctccagcaggcgcaggcgcaactggcagaggatggtgctcttgccgaagccggccggcgcgctgagcaccatcgcgcgtcgcccgcgggcctcgtacaggcggtcgatcagcgcctggcggggcagcagcggcagccctccggcgcctggcgggaacagcttggtctgcaacagcggaatggtgctggcgggaacaccgtcacgatggcccatggtcagagcaggctcagctcgcgggctcgccggatcgcctgggtgcgattgcgcaccttgagcttttcgtagatgttgtgcagatgccatttgacggtccccagggccagcgacaggcgctggccgatttcttcgttggataggccctgtgcggccaggcagaccacttcgcgctcgcgctccgtcaggccttcctcgagcgcatcctggggcttgcgcacgccctgcccgggccagatgccgagcaggccgcgaatgaaggtctgtagcgccggctggcgctcggtggattcgagttgctggagcaactggcgaatgccgtcgccttcctcgatgaagaggctgcgcaccccttcccgttcggcattgatcaggcattcgccgagcaggctgttggcccgttcctggtagcccaggcgctgatagctgagcgccgccaggatatccaggcgcaggcgctgcaggccatgccaaccgggctgcaaggtgccgcgcaactgagtgatctcgtgcagcgcctcgctgaaatgtcctcgcccctgcaacaagcgcacgcggctcacacccagcgaccagttgaccgggttgaaggccatgttgcggtagtgtgccgccatcttgttccagtccacgctcttcaaccgctgctcggcgcgcttcaggcggtcggggccgctgtcctggaggatcaggttgatctcttcggccatggcctgggcgaagaagcgccacgactgattgcgcgaggccagggcctgcatcgccgccaggctggccagcgcctccttcggccgtcccagcaggcgctgggtgcgcgccaggcagatctgtccctgggcatagaaatcgatcggattgatcacatccacatgcccgagcgcccagcccaggcgctcttccagcccgtccagctcgatcctgtagtaggcggtcagggcctcggtgatggtcggcagcgccagcgcgctcctggacttctcgaacagcggccgggcgcgctggcggagccgctcgatgagcagttgcgcctgtttcacctggccctgctcgagtgcgaggatcacctcgacgttggccagttgcatgtccaggtagcgcccttcgaggaaatgattgcgctgctgcgccagccccagcaggcgccgcgcctggtcgccctggccacggaccacctgggccagcgcggcagtgatcaacaccgccacttcgaggaaggcagcgttctgcccgagctggacttcgacccggcgagccagggcgatgcacagttccagatcgtccttctgcaacgccaccaccgccttcaccgccagcgcggagaggtactggtcgcccatcggcccgtcgccgcggctctccccccagcgcgccagcagttcgtcgatgatccggttggcctcgcccaggctgaggtcgctggcccgcgaccagacatcggtaaggaccaggatcggatagcgctcggcgatttcgtccggcacatgcttgcgccaacggtagatcaggctgagctggccgcggttgatcagctccagtccgcatccgtcgaccagcgcggcgatcatctccgggtcttccgccgcacaggcatgctcgatggcgaacgtcggcatgtggtggttggtgaaccacaggctggcgttgaaatgcagttgcttgaaacggtccggatcggagtcgcgcaggcggttgcggaggaagtcggcgaacagcaggtggaagcgataccactggcgttcgcgatccagcggcaggaggaacaattgcatggactccaggcgctccagcagcgcctggccgtcctggcgcccggtcagggcgttggccaggtcgccgctcaattggctggcaacgccaagggccagcagcgcttcctgcaggtcgccaggcaagcgttcgaagaccgccgccagcagataggcgctgaccgcctgcttgtcgccgtcgagcagggccatttcctgcacctgcggttgctggcgcagccacaggctgacgagatgcacgcccaccacccagccttcggtctggccatagagcgccttcaggcagggctcgtccagatagagaccgctacgctcgaggtattcgcgggtttcctcgaagccgaggcgcagctcctcgagaccgatttccagcaacagccccttggcccgccaggtagccaggctcagcgccggctgcgaacgcgtgcccagggccaggaccagcccggggggtgcgtactgcaccaggcggttgaggccggtgaagatgtccgggttgctaaccaggtgcaggtcgtccagcaccagcagcaacggccgcgcatagcgatcgagatcgccgagcaggctttcgatcaccgccaccaccgggacccgcatggtgttctgcaggtaggtctgggcgtcgtcgccaagctgcggcacggcttcgcccagcgcctcgatgagctgccggcagaaacgggcggggtcgtcgtcttcttcggccagcgacagccaggccaccgcctggtctgctacagtgcgctccctggccagggcggcgagcgcgcaggtcttgccgaagccggcaggtgcggaaaacatcagaacgcgtgaatggggattgcgatccagcaggttgcggatcgcggggcgaagagaatattcggctggcacctgaggcggcactattctggagcgcgaaaggctgccggctgctggatcctgtactgcatccacggcctgtatccctgtgtcattatcattgtggtacggagccaaatctccgtgggatatttccataattagcagatcacccttcttacgtaaactgaagaaatggctctaggatcgacgattccggcgaactagaattcctgactgtcccactacccccactttccatgcccagttgtcatgttcaccccctgccctaccatagcgacccaagctgtctctttgccatcatccatgaggcgcccggtgcggtgatgctcgattcgggtcgccccatcgctacccgtggacgctatgaccttatgagcgcctggccattggcagaactggcaccgctgcccgacgaatcggccaaccgcttcttcgctcgcctacgcgaagcggccggaagcctgggccccgcgcagctgccagcgccgtacgaactgcccttcgccggcggtctgctgggctatttatcctacgacctgggtcggcgcatcgagcgcatcggcgaacacgcccgcgatgacctgggcctgccgctggcctccgtcggcctgtatgcctgggcgctgatcagcgaccaccaggccggcaccagccaactggtattccacccgcgattggacgagcgcgaacgccagcgcctgatcgccctgttcagcgaggaaacgcaaggcacggccggcaacttcaagcttctgggaaaattccgacggagcatcagcgcatccgactatcggcaggcgatccgccgcatccaggactacatccaggcaggcgactgctaccaggtgaactatagccagcgcttccaggccgcttgcagcggctcgccgtggccggcctatcgcgccctgcgcgaggcctgcccgacgccgttctccggctacctgcgactggccgacggcgcgatcctcagcctgtcgccggagcgcttcctcaagctcggcaagggtaaggtggaaacccggccgatcaagggcacccgcccgcgcggcaagacgcccgaggaggacatggcgctggcggcgtcgctgctggccagccccaaggaccgcgcggaaaacctgatgatcgtcgacctgctgcgcaacgacatcggacgcagttgccaacctggcagcgtacgggtaccggagctgttcgccctggaaagctatcccaacgtgcatcacctggtgagcagcgtcaccggcgaactggcgccgggcaaggacgccctcgacctgctggaaggcagcttccccggcggctcgatcaccggcgcgccgaagattcgcgccatgcagatcatcgacgagctggaaccgagccgacgcggcatctactgcggcagcctgttctacctcgacgtgcgcggcgagatggacagctcgatcgccatccgcaccctgctggtcaggaacggccaggtcagttgctggggcggcggcggcatcgtcgccgactcgcactgggaggacgagtatcaggaaaccctggacaaggtccgggtgctgctggaaaccctggaaggaatggccgggacagcgtccccggaatagaaaagagcccgcgttccgcgggctctttcatcggcggcgcggctacaggctcagcgaacggctggaagccttgaggaactcgcgcttgaggtcttcgtaggtatgcaccgcggggaactggggaaactcgcggatcacgttttccggggcatggaacaggatgccggcgtgggcctcggaaagcatggtggtgtcgttgtaggagtcgcctgcggcgatcacccggtagtagaggctcttgaaggcgatcaccgactgccgcttgggatccttctggcgcaattgatagccgaccacgcggtcgctgtcgtcgatctccagcttgtggcacaacagggtcgggaagcccagctggcgcatcagcggctgggagaactcgtagaaggtgtcggagaggatcaccacctggaagcgctcgcgcagccagtcgacgaattccaccgccccctccagcggcttcagggtggcgatcacctcctggatatcgcccagcttcaggccatgttcgtcgaggatgcgcaggcgctgcttcatcagcacgtcgtagtccggaatgtcccgggtggtcgccttcaaggcgtcgataccggttttttccgcgaacgcgatccagatttccggaaccagcacgccttccaggtcaagacaggcaatttccacaggactctcctcgaaattctctgaacgatgggtgacgacggacgcggcactctagcccctcgccgagggcaaggcaacgccggcttattcctggaatcaaggtcgacaggggtaaatggttatttagggccatatgccgccctttgctaccattcccgccacagagcgcaacagcgccgccccgcaccaggaccccagcccgatgagccagcctttcgaccttcccgccctcgcttccagccttgccgacaaatccccccaggacatcctgaaagccgccttcgagcacttcggcgacgagctgtggatctccttcagcggcgccgaggacgtcgtcctggtagacatggcctggaagctcaaccgcaacgtgaaggtgttcagcctcgacaccggtcgcctgcacccggaaacctatcgtttcatcgaccaggtccgcgaacactacggcatcgccatcgacgtgctttcccccgacccgcgcctgctcgaacccctggtgaaggaaaagggcctgttcagcttctaccgggacggccacggcgagtgctgcggcatccgcaagatcgaaccgctcaagcgcaagctcgccggcgtgcgcgcctgggccaccggccaacgccgcgaccagagccccggcacgcgcagccaggtggcggtgctggaaatcgacggtgccttttccacgccggaaaagccgctgtacaaattcaacccgctctcgtccatgaccagcgaggaggtctggggctatatccgcatgctcgaactgccctacaacagcctgcacgaacgcggctatatcagcatcggctgcgaaccctgcacccgtccggtgctgcccaaccagcacgagcgcgagggccgctggtggtgggaggaagccacccacaaggagtgcgggctgcacgccggcaacctgatcagcaaggcctgaaaccgtcgatagagcgtatgcaatcggggtaaagtgcaggtcgaaccccgagcggagacccagcatgcgcatcaccatggtcaagaaagtcctcgccaacggcgaggactgccgcaagtgcaaggaagtccggcaacgcctggaacaaggcggctacctgccgcgcatccatcgcaccctggtggccgacgaacgcgacccgaacagcgcaggctggatggtcgccgcccaatatggcgtagagaccgcgccgttcttcgtggttcgccacgacgacgggcgcgaacaggtctacaccgtgttcatgagcttcctccatgaagtcctcgaaccgcgagccgagcagtccgcggacgctgatcgcgaagcgttggccaggctggccggtcgcgacaatctcgacatgctctgagggccagccatgaaaaagcccggcaccaggccgggctttttcatgggccgaggcgatcagtagaccggcagttcgatgccgtcgaacaactcgtccagctcggccttgttgtggcattgcacggccttggccagcagctcgcgggtcaggtgcggagcgaatttctcgatgaagtcgcacatgaagccgcgcaggaaggtgccgcggcggaagccgatcttggtcacgctggactcgaacaggtggctggcgtcgaggatcaccaggtcgttgtcgagcttcggatcgaccgccatgtgcgccacgatgccgacccccaggcccaaccgcacgtaggtcttgatcacgtcggcatcggccgcggtgaataccaccttgggcaccaggccgcgctggctgaaggcttcgtcgagcttggagcggccggtgaagccgaacacgtaggtgacgatcggctgctcggccagggcttccagggtcagtttcggcagcttggtcagcggatgcccgtggggcacgatgacgcagcgattccagcggtagcagggcatcatgatcaggtcgccgaacaactccagcgcctcggtggcgatggcgaagtcgacggtgccgtcggcggccatttcggcgatctgcatcggcgtgccctggtgcatgtgcagggagacgtccgggtactgcttgatgaagccgctgatcacgttgggcagcgcatagcgcgcctgggtgtgggtagtggcgatggacagcgtgcccttcttctcgttggagaattcctgggcgatctgcttgatgctctcgaccttgcgcaggatctcgccggcggtatggatgatccgctcccccgccggcgtcacccgggtcaggtgcttgccgctgcgagcgaacacctcgacgcccagttcgtcctccagcaggcggatctgcttgctgatgcccggctgcgaagtatagaggctctgcgccgtggcggagacgttgaggtcgtggtgcgcaacctcccagatatagcgcaattgctgaagcttcatggagattcctcgaaaaggttgtcgcgaccggcgatcaagaaccgaaggtatataaccatattaatggtttgaggaataaaattagacgttttttttgattttgcacgctttttcaccagccgaccgctggcctacaggtcgcgactacggtgctgcaacatcggcaccaggtacaccggtacctccgccagttgcaccagacgcgcggcagtccggcccagcggcgtgtcgagttgagtgccgtggctatggctgccggcgacgatcaggtccacggccagcttttccgcctcatcgaggatcatctgcggcgggtcgccctgcaccacccgcacgctcttgaccagcgccgcatcctggggcaactcgccgagttcatcgcgaaacccttccaggacccgcttctcgatgctttccatgacgttgtccagcccttgcgcccgcaggtcctggagacgctcggtgtcaaggtaggtctgcaggaccgactcggcgaacagcccgaggggctccaccacatggacgacatagagctcggcgttgtaggcgcgggtcagcgacagggcgtgttgcaggacatagggagcatagagccccagatcggtggcgtagagaatcgaacgaatcatgcggcctcctcgacagcctgcgcggcgggcctcattagcagattagcagcaagcatccattctcctagcgttccctgctgtttcgggctttttccggcccgttggggtaaatcccttttctccctgcgagcgcggcgccggctggtcgccgcgctcggcccttcagcgcggttgtgcttcgaggaagcgcaacgcctggtacagcgcctcgaccctgggcatccggtagcccgcagcagcagcgcgggccaggggcgcggcatagatcgccgccagctccaatggccgcccatgggcgaagtcgtggtacatgctcggccgatagtcgggcatccgctcggtcgccgccagcagttggtccgcatagccctcaggcaggatgaagccgcaggcgccggcagcaccgatgacttcctccatgatcgcctcgatcagcgaccgactgtccgcgttggccatcagcggcgcggtgctgctcttcagcaataccgacagcccgttgtaggggatgttccagaccagcttctgccagcgcgcctgctccaggtcgggcatcgccgtggactccagcccggactcgcggaacagcgcggcaccctcctcgacgatctcgcgccggcgtcgctcgtcggccggtccggaatgatagccgagattcactccgccgtaggcctggtgctcgatcacgcccggttcgccgcgatgcacacagatgaagcagaggccgcccagcagatgcaggctttccggcagcagcggccgcagccgctcctccacgcccagaccgttctgcagcagcagaaccttggctcccggcgccgccgctgcgcggatcaggggtgccagttcgtgattgccggtggtcttggcgcccaccagcaaccagtcgcagggcggcatgtcctgcgccgaatggtaggcctggaccggcgccaggcgccggaagccatgcaccgcactattcaggctgagtccggcgcgattgaccgcctcgaactcgctgcgcaggagaaaatgcacgtcgtgaccggcatgcgccagcatcaatccatagaagccgccgatggctcccgtaccgatgacgccgatccgttgctgctttgaatccatcagggcaactcctcaggtaaagcggtcgaccccgccagcaccgcaccccgcaaggcttcctggtgcagcggaacgttcagtgcgccatggaagcggccgtcgcggaccatgaacagggccggcaggtgaaagacgccgtagcgttccaccaggccgccattgcggccggcgtccacccagcacaggcgctcgatgggcaggtccatcgcggggagatggcgccgggcccagcggcacgacgcgcagccttcgctggtgaataccaacagcgaaaccccttccagggcaagcaactgccggtcggcgtccagatcggtgagttccagggacggcacgctgctgacctcgatagaaaggaagaaatggggcccgaccatcatccgtaggcttcggctcctgcgatagcgctggcgccctcctcggccagcggatacgcgcaaggcgcgcccctccgcagcacctgcacaatatcgtccgcggcggcctcacctgcaactccgctggcagccttggcccggagcaacgaagaaaacgtgcgcagagcggggaaaacaccggcgaaccgcgtcccgcccattgtctaggcccggcccgacacgttaaggttcgtctccccgtttgcgaacttcatgcctgcgccctttcgcagggggcctcccggcggccggcgcccgtgacctgattgagtaccacgatggctgatttacagatcgacgaccttaacgttgcctccaacgagaccctgatcacgccggagcagctcaagcgtgaaattcccctgaccgacaaggccctgcagaccgtggcccatggtcgccaggtggtgcgcgacatcctggatggcaaggaccaccgtctgttcgtggtgatcggcccctgctccatccacgacatcaaggccgcccacgaatacgccgaccgcctcaaggcgctcgcggccgaagtggcggatacgctgttcctggtgatgcgcgtgtacttcgagaagccgcgtaccacggtgggctggaaaggcctgatcaacgatccgtacctggacgactcgttcaagatccaggatggcctgcacatcggtcgccaactgctccgcgacctcgccgagaaaggcttgcccaccgccaccgaagcgctcgacccgatttccccgcagtacctgcaggacctgatcagctggtcggcgatcggcgcccgtaccaccgaatcgcagacccaccgcgagatggcctccggcctgtcttccgcggtcggcttcaagaacggcaccgatggcagcctgaccgtggcgatcaatgccctgcagtcggtctccagcccgcatcgcttcctcggcatcaaccagcagggcggcgtatccatcgtcaccaccaagggcaaccgctatggtcacgtggtgttgcgcggcggcaacggcaagccgaactacgattcggtcagcgtcgcgctctgcgagcaggacctgaacaaggcgaaaatcccgctgaacatcatggtcgactgcagccacgccaactccaacaaggacccggccctgcaaccgctggtgatggacaacgtcagcaaccagatcgtcgaaggcaacaactcgatcgtcggcctgatggtggaaagccacctgggctggggcagccagccgattccgaaggatctcgaccaacttcagtacggcgtctccatcaccgatgcatgcatcgactgggcgaccaccgagaagagcatccgcagcatgcacgccaagctcaaggacgtgctgccgaaacgccagcgcggctgagcgaggcggaaacgaaaacgccgggctgatgcccggcgtttttcattgcgcacctgctcaggcggccggatcggcctgacgctggcgacgctcgatgtaacgctccacgtaggagcaggacgggatcacgctgtagcccatgcggtcggcgtactgcagggcgtgttcggtcagcgcggcggcgataccgcgaccccgcagcgaatccggtacgaaggtccggtagatgtccagcgtctgcttgcccaggtccatatacgccagataggcacgatggccatccaccgtcgtctcgaactgatggccgcccacgtcatgatggatggacagggactcgctcactttggatctcctcaacgggttcgtaacccgacccgcgcctgattgatagggttcctcgcgaggatgcccccgcgtaccggccttcagcaggccgccggataacttcgtccgttctcgtcccggcggctgagcgcgcctggcggacatcctcgaaacgggtgacctgcaccgcatgcaaggccggactaacgatagggcccatattgctgtcttccccggccagactcaaccgtttcttctgccaggaacgcgcaggcgtcactggagccctgctcgggaggcccgcgcaagcacaatcgcgcatgacccgcgggtcagccaaagcgctttacgccgacgacgcccatcagtaaggtctgcgccactccaccaaaaggaatcctgccatgagcgagttgatcagctaccagttcgaagacggcatcgccaccctgaccctcaacaacggcaaggtgaacgccatctccccggcggtgatcgacgccttcaaccaggctctcgaccaggccctgcaggacaaggccgtggtcatcgtcaccggccagccgggcatcctctccggtggctacgacctgaaggtcatgacctccggcccggagaatgccgtcaacctggtcgccgccggctcgaccctggctcgccgcctgctctcccatccctatccggtgatcgtcgcctgccccgggcacgcggtagccaagggcgccttcctgctgctctcggccgactaccggatcggcgtcgacgggccgttccagatcggcctgaacgaagtcgccatcggcatgaccatgcaccatgtcggcatcgaactggcccgcgatcgcctgcgcaagtcggcgttcacccgctcggtcatcaatgccgagatgttcagtccggccgctgcggtggatgccggcttcctcgacaccctggtcagcgccgaccagttgcaggaaagcgcgcgtgcagcggcccagcagttgaagaaactcaacatgaccgcgcatcgcaataccaagctcaaggtgcgcaaggcactgctggaaaccctcgaccaggcgatcgagctggacaagaagcacctgggctaaggcccgcgccagcgaaagcccggttggtaccgggcttttttgcgcccaataattacttattacgcaaaggtaactctccctaactgctatttttaaaaaattattacggattatcctggtgacattcccaaggaaaaccggaggtcatcatgaaacgcaacgtcttcgccgccattctcctcggcatggctaccaccctcgcagtgcaagccagcttcgccgacgaatccagcctgatggaaaaccgcatggtccaactgaaccagcacgccatcgagcaggcccagcagcaacaggccacggcgccaaccgcgagcgacaccgatgcgcagggttgaacgccgcctgccaggaacgtttttcttttccccgcaaccctgaaaagcccggctcacgccgggcttctcgttcaggccagcttttcctcggccgccacgcccttgcgatagacctcgtagagaatcaccgggatctccaggtcgcccaggtggcgaaccaccagcggcttgacctcggaccagtccagcccgcccactcccgtcgccacgcagggcagagccaggctgctcaccccttcgctgcgcacatagcgggccagctcgcgcagggcatggccgacatcctccaggctcgccttgcccggcttggcgctgcgaccgctgtgcagcatgccctgggtgatcaggttgacgatgcactgggtcttgccctgctcgtcgaccccggcccagacccagatgccgcccggctcgggcgccctggcatgggcggcatgccggtagtcgcgaaccatcgacggccagcgttcgcgcaaggcgagggccaggccgctgtcgaaatggtcctggggcgcgatgccgtgggcgatcacctgggccccggaaagcagaatgtcaccttcaacttcacgaatcatgagcgtttccttcttggcttcgggacaggcgcttcgtgcgccgccctgcatctttcaccgtacgccttgcccgccggcgccagttgatgcgtatcaagaacggccggtcccatccgctacgggccgactagactgcatgcgagggaaccttggaggcgcctcgcctctccattggattccagcctcgtgccgtctcatccatgacaaggaaacaaccgccatgccgaaatggattgcactttgcctgatcccgctgttggcaagctgcgccacctgccgccaggacagcgacagggaaaaactgctgtacgagaacgacatgctgcaggcgaaactgatcatcgtcgccaacgaccgcgatcgcctgccgctggcccaggccctgctggagcgcgcggcgcgcgacgaccgcagcggcgaggcggacttctaccaggccgtgctgatcgctcgccgcgacggccaggccagcgattgcgagcgcatcacccgcctcctcgaacgttccgccgagcgaggctacccgctggccaacgcgatgctctacaagatctacgccgagcccttcctgttgccgcgcgccgacattcccaaggccgagacctatcgccaggcctacgccgagctgccggtcgcgcgcagcggctacccctccttcgagcgagcccggcaggtggtcgatcgcctgctcgcgccgacttcgtcctgatccatcgggcccgaacccgggccccgcaacccgtaccggtcgttcggccaaagcatcatttctgtcgatagttaatagcgctaaaattcgttatccaatcgaattcttctccgcgaccctatgcccatccgaggtatcgatcacggaagccgccatgaaacgtcgcagcccccgccattacgcccgcaacaccgccctggccaccctgggtctgtacgccatcctcatgctggtcgtgctgagcctcgtcgccggcgccgaaagcgccaggaacgccacaccggacaacgacaccgccacgaccttctccaaccagatcggccaggccctgccaggcctgctctcggggttgaacagtcgacgcgccggttgaacgccggcttctttcccgggaaacagcatgagaaggcaaacacggaaattctggatcgtcgccgccctggcgatattgaccaatggctactcgctactcggcctcgcccaaggctcggcaggcgcactggcgcgcaccatcgaatgcaaccaggcgatggtccgcgcgctggcggccaacctggcgctgaagctgcagagcggcaccccgccggcacgcccgcagcgctggatcccggagcgcttcatcctcgactgcccggcctgaaacgaaaacgccgccaaccccgggaggctggcggcgctcgcatggcgcggagccggctcaggcgccggtcggctggcgcgcgacgaaacgcatcatccattcggcgacaacggtgccctggtggtcccccgccaggctatcgactcccttgcgatagagttcctcgcccaggtgctgctggcgcagttcgagcagttcgcgggagtagtcgtggacgaactcgggatgcccctggaagcacagcacctggtcgccgatggcgtaggcggcatagggacagaagtcgctggaagcgatcacccgcgcgttttccggcagccgggtgacctggtcctggtggctgatcaacagggtcaggtccggcagcgccgggctcatccagtcggcccgttcgttcaactggtactggtggatgcccatgccccagccctggctggcgcgctcggccttgccaccgagcagcagggccagcaactggtggccgaaacacacgccgaggagcttgtcgccgcgctcgtagcggtccaggaggaaggtcttcagggtctggatccacgggtcgggaccgaaggagtcggccttgctgccggtcaccaggtaggcgtcgaagcgctcgtcgtccgccggatagcgcccctccaccacgttgtagatgacgaattcggcggcgatcggttgcttggcgaacagttgctggaacatccggccgtagccttcgtagcgctcgatcagctcgggacgaaggatatcggtttccaggatacagatgcggagcgacataaagactctctgaagaagtggggttattgtcgttttcgtttgatttaattaacacaggagcgcgggcaagggaaccgtcgccctggcctcgaaaggaatatccggacgattcgccaaaaaacaagcagccggcagaaagattcccgagacgcccagccgtaaagaaatctgcacaggagacggaaggactccccatgcccggaaccgccacgtaaactggcggttttcccgcgaggcacacgccatgttgctcaaggcagtacgtaacggactgggtcaggcgattatcctcgccgacttcgtcagccgcccccgcaagctgcagcgcagcgccgaggcccaggccgaggtcgagcgggcgctgcggaacctgtcgctctaccagttccgcgcctgtccgttctgcgtgaagacacgccgcgccatgcaccggctgaacctgccgatgcaactcaaggacgccatgaacgatccgcaggcccgccaggctttgctggaaggcggcgggaaggtcaaggtgccgtgcctgcgcatcgaggaaaacggccaggtgcgctggatgtacgaatccagcgagatcatcgcctatctggaaggtcgtttcgccaacgcctgagcggccgatcaacggcccccggccgcgtccaggggcagccggtggatcaggaaacgcgccggcacctcgccctcgcgccccggcaacaggcggtggcgaatgcgggactcgctgacataggcgcaaccctgtccggtgacggtcaggttgaccggcgactccaggccctcgcgtatcacttcgatgccgcgccgccctggagcgagcggctcggcgatccgcagcaccttgccggcgccgctgcggatggcgttctccagcacgatcagcgagccgtccggagccaacgccatgccgtccggattctccagcgttcggggcagctccatctcgcgcagccgcggacgcgtggcgaccccttcgacgacatggatcgccccgctaccgaagttgccgaccagcagggtgtcgtcgtccacccggacgatgcccgccgcgcccaggccgccggggccggccaggcggctgtcgcgcagcaacacctggaacgccggttccccgggccgcagccgcatcaggctgccatcccgggtttcgctcaggtagaccgttccgtccggcgccaccgcgagatcgttgcccatcccgtcgccgggcagggtcagatatcggcgcacggcaccggtcgcgagatccagggcaaacaccccatgcggccggcgccggccagcgggtaggaagtccggcgaattgccccagagcaggccacgcggctcgtccagccgcagcgcggtggcagcgaagatcgccgggctgccggcgaagaaggtttcccactcgcccccgggaggcttgcgcaggatgcgcccgctggtgaccagaccgatgtacagcgttccatcggcggcatgggcgatgccgttgggataccgggcccccgctggcaggacgatgctcgtcgcggcgcaggacggctcgcgctcgcccggcgcacgggcgaaaaccggcaagacggtcgccgataccatggataccagcagcaacacggaagcctgtcgtctcatcatgctttctccgtcgatgtgcgccctaccagcgcggggtccgggcgcgcaccgtgagcggcgcctccagcgtggcgcactcctcttcggcgaggtccagcgtcagcgccgcgagggcatcctcgaggtgatgcggcctggacaggccgacgatcggcgcggcgacaccgttccggccaagcagccaggccagggcgagttgcgccggtggaagcccgcgggcagcggcgagtttctccaacgcgccgagggtcgactcgacttcctccctgccgccgtaccagcgcggggcctgttcgtccgtccgggtccgcagcgtgccggcgcttcgcgctccggccagcagcccacgcgccagcggcgaccagggcgtcaacgcgatcccctcttcccggcacagcggcacgaggtcctcctcgtcctcgcgaacgatcaggttgtactggctctgcatcgagatgaattgcgccaggccgtggtggcgctggaaggcgagcatcttcatgaagcgccaggccggcatcgacgaggcgccgaggtaacggaccttgccggcacgcaccaggctgtcgagggtttcgcaggtttcctcgatcggggtttccggatcgaagcgatggatcacgaagagatccaggtagtccgtacccaaccgccgcagcgaggcatccacgctggcaagcagatgcttgcgcgacaagccgcaggcgttgggcctgtcgctcatgggaaagaacgccttggtggcgattaccaggtcctcgcgttgcgcgaagtccctgagcgcgcgtccgaggatccgctcactctcgccggtggaatagatatcggcactgtcgaagaagtcgatcccggcttccagcgcctcgcgaatgaacggacgcgcccgttcctcgtccagcacccatggacgccacgccggatcgccataggtcatgcaccccaggcagagtcgggagactttcaggccgctgttgccaagacggacatgctgcatcgtacgacctcgtcggagggctctgaaaagagcggtttccccggccccaccctgttcatgagccaggtttcccgacgatgctatattgctgccgaatagctaactatcctggaaaaatctctttcattgatcgagttattttaataatccaatgaagaagcccgatctcgccggtctcgccgccttcgtcgccatcgctcgcgaacgcagtttccgccgcgccgccgccaccctcggcgtgaccccgccgacgctcagccacaccctgcgcgaactggaaacccagctcggcatccgcctgctcaaccgcaccactcgcaacgtctcgccgaccgaggccggcgagcacctgctggcacacctggacccggcgttcgaagacatcgccgccgcgctggacagccttaaccgctttcgcgaaacgcctcacggcctggtacgaatcaacgcaccgcgaaacgccatcggtctcgtcctcgcgccacgtttcggcgaactggcccgcgactatcccggcatcaccctggaagtggtggcggacgagggtttcgccaatatcgtcgaagccggtttcgacgccggcatccgcctcggcgaagacctccagcacggcatgcgcgccgtgcgggtcggcccggacctgcgcttggccatcgtcgcgaccccggcctacttccgacggcaaggcaggccgggtagcccggaggaattgctcggccaccgttgcatcggctggcgcaaggtgtcttccggagagctttacaaatggcaattcagcaagggcacgaaagcgctttcggtggccgtgagcggaccgctggtcctcgacgacccgcgcctgatgctacaggcggcgctggccgatgtcgggattgccttcgccatcgaggaggaagtcgccgagcacctcgccgccggccgcctggaacgggtcctggcggattggtgcgccccctttcccggtttccatctctattatccgaaccgccgcaaccacccggcggcgttgagcaccgtgatcgacctgctgcgctaccccggcgaggaacacccaggtcccgcgtaggcacatcggcggaagcgcccgtggcggcctggctggcaagaaccaggggataccggggtggcgtcatccgccgcggtacgcaaccacgagaaagccggcccgaaggccggctctccatgcgacgccaggactcagaacagctcgcccttcgccgccttctccagcaacagcgccggcggctcgaagcgctcgccgtactgttcgaccaggtattgggcgcgggcgatgaagtccttcaggccgtactggttgatgaactgcaaggcgcccccgctccaggcggcgaaaccgataccgaagatcgagccgatgttcgcgtcggcggtggagtgcaataccccctcctccacgcaacgcacggtctcgatagcctggatgaacagcaggcggtcgcgtacgtcctcggcggatatttgcgcatcgggcttctcgaagcggctcttgagttccgcccagagatgtttcctgccgttcgccgggtagtcgtagaagccggcgccggccgccttgcccgggcgcttgtactcattgaccatcaggtcgatcacggcgaacgcggggtgcgtcggcagagccttgccctcggcctcgaggtcgcgggcggtctggttgcggatgtgggtcatcaggctcagcgagacttcgtcggaaatcgccagcggccccaccggcataccggcctggcgcgcctggttgtcgatcatcgcggcgctcacgccttcgccgagcatggcgatgccttcgttggtgaaggtgccgaatacccgcgaggtgaagaagccgcggctgtcgttgaccacgatcggcgttttcttgatctgcagcacgtagtcgaaaccgcgtgccagggtttcgtcgctggtcttttcgccacggatgatctccaccagcggcatcttgtccaccgggctgaagaagtgcaggccgatgaacttctccggccgcgccaccgcctgggccagcccggtgatcggcagggtcgaggtattggacgccaccaccgcatcggccagggcatgtttctcggcctcggcggtgaccttgcctttcagcgcgcggtcctcgaagaccgcctcgatgatcaggtcgcagccttcgaagtcggcttcgctgacgctcggcacgatccgcgcgaggaaggcgtcgcgcttctcggcggacaggtgcccgcgcgcaaccttcttgtccagcagcctggccgaataagccttgcccttctccgccgcttccagcgagacgtccttgagcaccacctcgatgccggccgccgccgatacgtaggcgatgcccgcgcccatcatcccggcgccgagcacgccgacctttttcgtcgcccgcaccggatacccctgcggccgcgacttgccggcgttgatctcgttgagctggaaccagaaggtgccgatcatgttcttcgccacctggccggtggtcagctcggtgaaatagcgcgcctcgatcagttgcgcggtgtcgaaatcgacctgggcgccctccactgccgcgcacatgatcttctcgggcgccgggaagcaacccttggtcttgtcgcgcagcaccgacggtgcgatggccagcatctgcgccacgttgggactggcaggcgtaccgccgggaatcttgtagccggcgctgtcccagggctgcttcgccgccgggttggcgaggatccaggcgcgggccttctccagcatttcctcggggctgtcggccagttcgtggatcagcccggccttgagcgcttcagccggacgcaccttcttgccttcggcgaggtacggcagggctttctccaggccaagcagtcgcaccatgcgcacgatcccgccgccgcccggcaacaggccgagagtcacctccggcaggccgagctgcacgccgggattgtccagggcgatgcggtggtggcaggccaggcagatctcccagccgccgcccagcgcagcgccgttgatcgcggcgaccaccggcttgccgagggtctccaggcgccgcagttggcccttgagttcgaggatgccctggtagaaggccggggcgtcggccttggtgaccttgatcagctcgttgagatcgccgccggcgaagaaggtcttcttcgccgaggtcagcaccacgccggcgatcccctctttctccgcctccagccgtgcgatggtcttcgccatcgcctcgcggtagacaccgttcatggtgttggcgctctgcccgggcatgtccatggtcaggacgacgacgttgtcctggcctttttcgtaacggatagcgtcagtcattccggttctcccttcacacgcgctcgatgatggtggcgatgcccatgccgccgcctacgcagagggtggccaggccgtagcgcaggttgcgccgctccagttcgtcgagcagcgtgccgaggatgatgcagccggtggcgccgagcgggtggcccatggcgatggcgccgccgttgacgttgaccttgctttccgccacgcccatgtccttcatgaacttcatcaccaccgaagcgaacgcctcgttgacttcgaacaggtcgatgtcttccaccttcaggccggccttggccagggccttgcgggtcgccggcgcggggccggtaagcatgatggtggggtcggtggaggtcaccgcggtagcgacgatccgcgcccgcgccttcaggcccagttcgcggcccttggcctcggagccaatgagcatggcgctggcgccgtcgacgatccccgagctgttgcccggcgtatgcacgtgctcgatgcgctcgacctggctgtacttgcgcagcgcggtggcgtcgaagcccatctgccccatcatctcgaaactcggtttgagcgcggcgagcccttccagggtggagtcggcgcgaatgaactcatcgtggtcgagcaggacgatgccattctggtcggcgaccggcaccagcgacttgccgaacagcccttcggcgcgggccttggcggccttctgctgggagcgcagggcgaaggcatcgacatcggcgcgactgaagccttccagggtggcgatcaggtcggcgccgatcccttgcgggacgaagctggtgtgcaggttggtttccggatccagtgcccaggcgccgccgtcggagcccatcggcacgcgtgacatggactcgacgccaccgaccaggaccaggtcctcgaagccggagcgtaccttcatcgcccccaggttcaccgcctccaggccggaggcgcagaaacggttgatctgcacgccggcaacctgttcgtcccagtcggccaccagcgccgcggtcttggcgatatcggcgccctggtcgcccaccggcgtcacgcagccgagcacgatatcgtcgacctgggcggtatccaggtcgttgcgccgctggaccgcgcgcaacagcccggccatcaggttcaccggcttgacgctgtgcagcgcgccatccttcttgcccttgccgcggggagtacgcacggcgtcgtaaatgaatgcgtcggtcatggcggtctctcttatcctgttctcgtccggccgagcgggcctccgcctaccttaaacaggctcgccggcgggacaatgaccgaaccgctcaggctgattgaccgcccagctcagcctgcaacgccgggaagatagcaccgtgccatctttcgaccggaaacccggacaccggacgaacggtcgagacgcacgccagagccgtcaccacgctgtcatatagagggaatatgtctagaccgcagcagcttgtatccaagtggtctaagcccgcgcaggccggggcttagactgattcatgcaagcgttcgaaagggaggtcgacgccggggatgccgggccgaccgaagagtacgccactgcgtggcaagccgttccgccgggccgtagcgcggagcaggcagccacccgacaacaagaaaggcagacaggccatgttgaacgagcagccaaaaagatggcggcaagcgagcctcatcgtcttcgccaccacagtcatcctgatccttcccaaccttaacagtctgatccgctagggcacccgctgcctgcacgctgcgcaccgcctcgcggtcagcgcagcgcaggcagccaccaggtcagcagcagcggaatgaaggcgaacgacagcagggtcgaacacagcaccaggctggcgacctgatccggcgaacgattgccgcgcaaggcgtagagatagttgaacaccgccaccggcatcgacgactgcaccaccagcaccccctgcgccagcggcggcaattgcaacgccagcgccaccgaccagcccaccagcgcccccagcagaagacgcaggccgccatagaagaagccattgcccagttgccgcgggcggatgctggccagggacacgccgagggtgatcagcatcagcggaatggtcagcccggccatcaggtcgacggtattcgccatccagcgtggcagttgcaggtcgagccccatcaacaacaaggccagcagcacgctgagcaggatcggattgcccagcagcgagcgccaggagcgctcgccgctcatccagaacacgccgaggctgaagttgccgatcgacatgatcaggtagaacgccaccgccagggtcatccccgcctcgccgaacgcatacaggcacaccggcaggcccatgttgccgacattcgggaagctgtaggccggcaccagcacctgccactcctggcgcccgaggcgcgccgccgcccagcccagcgcagccatgcagacgcagatcagcgcgctggccagggccatccggccgaaactgtgcaggtccacccgggtatgcgccagggtggcgaggatcaggcatggcgaaccgatgttgaacacgatgcgcgaaacgaactcggtcggataggcgtgtccgagacggacccagacgtaaccgacaccggcgccgaacagcacgggcgccatcacggcgaacaactcggcgagcacgggaaccccttggttagccagctatgcaatggcccgcatgctaccgcgaggcccccgttccgtgccaatctctcgctccatgtcataaccggcggatgcacgaggaacccgcatgcctgtcactctcccgcgcctggcgttgctaggtgccctgctcttccctgtggctgccgcctgggccgccgagctccgcctggaactgccggggggcacgcagacctggagcagcgaagaactgctcaggcatccgcaggcccgcgacctggacatcccggccgacgtcgcctaccgccggaacatgcgctaccgcgccgtgccactggcggcgttgttgaaaggcgtgcatcccgaagaccatttgcaggccgtggccagcgacggcttcgccgccgagttgccggccgccccgctgctcgccgaacagggctcgcaagcctggctggcgatagaggatccgcagcgcccctggccgccgctgggcgccggcaagccgtccgccgggccgttctatctggtctggagcaaacccgaggaaaaacgcatcggtccggagcaatggcccttccaggtcgtccgcatccgctaccagtcccctctggccgaacgcttcccggccctgctgccggccgctgacgccagcgcggaggtgcgcgccggcttcgccgtgttccagaagaactgcctggcctgccaccgtctcaacggtgccggcgacgcccagttcggcccggacctgaacctgccgtacaaccccaccgagtacttccagccgcaattcctcgcccgctacatccgcgacccgcaggcgctgcggcaatggccgcaggcgaagatgccggcgttcccggaacgggtgatcgacgaccaggagttgcgccagttgatcggctacctgcgccacatggccggccgcaaggcgggcgcggccggctgaagcggcgtcagatgttgtacgccgagggcggcgacggcaggcgctccagcaagtcgtgcaggccggcgctccactggcggcggatggcgctgaaataggcgtcgtcctcggtgacccggtagccctccggcaggatcaggctgtcgcggtggtagaccagcaggtccagcggcatgcccaccgagaggttgctgcggatggtcgagtcgaacgacaccagcgcgcagcgcagggcctgctccagcggcgtgtcgaaagtcaggttgcggtcgaggatcggcttgccgtacttgctttcgcccagttgcaggaaaggcgtgtccggcgtggcctggatgaagttgccctggggatagatgctgtacagcgccggcggtccgccggcgatctgcccgccgaccaggaaggaacagctcaggtcggtattgccggccagattgccgccgtcgcgggccagcacctcgcgggtggtctcggcgaccagcgccgtggcgtcgtagaccgagggcacgttgagcaggctggcgccgtcccggcggatgcgctgctgcagcaggttgatcaccgattgcgaggtcgccaggttgccggccgtctgcaccaccagcaggcgctcgccgggcgtgccgaaggtgaacagcttgcggaaggtggcgatatggtcgatcccggcgttggtccgcgaatcggaggcgaacaccaacccatcggccaggtgcatcgcgacacagtaggtcatctcgaatcttccttattccgtccgtccccgcccctcaagcgtaaaggcaatcgccgataacgccaggcgcgcaatggatcgtcactgttgctgcacctgcagcagcggcgcgctgaccagcaccctcgcatgcatctgctcgcaaccgccgccacggcgcaagccgcgcaccgggcaggcatccaggtagtcgaggccgacggccagcttgagatggcgctccggacggccgagccggttggtcacgtcgaagctgtaccagccgtcgccgagccaggcctcggcccaggcatggctggccaggtgcgtatcgtcctcggtgtagaggtagccggagacgtagcgccccggcacgccctggctgcggacgcaggcgaggaaggcatgcgcatggtcctggcagaccccggcgcgtgcgccgaaagcctcgatggcggtgctgtcgacgcgggtcgcccccggctggtagaggatatgctcgtgcagcgcatgcatcaggtcgagcaggccgccgcggtccttgcggccgcccatggcgcgttcggcgaaggcgcgcatctcggcatcggcgccggtcaggcgggtgctgcgcaggaacggcaacggcgactggcgatcgtgctccacctcgcgctcctcgtcgatctcgaccaggccgtgggcggcgatcaggaccgactcatgcggttcgtccagggtcaggacgtgcaggatgttgccgtacggatcgcgcagcggccgcgccgggcgcggcaggtccaggcgccaatcgaccacgtgctggcgctcgctgtcctgtggggtcaggcgcaggtactggatgctggcgcgcacccggtcttcgtagcgataggtggtgtcgtgggtgatcgagagtctcatgcggcctccaggtaggagctgtgaatggcgttggccaactggcgaaccagcaggatgtagtcggtgatccaggtatgcaggccctgttccagcacctcgtcgatgccggtgtagcgcacccgcgcctccagctcggcggccaggcgctgcgccggccggccgttgacgccgggcaggccggaaaggatctcgctcagttcctcgatgcaggacagcagcgaacgtggcacgtcctcgcgcaacagcagcaattcggcgatgttgcgcgcgttgggcgaggcgcggtacagctcggtgtagccctcgaaggcggatagcgcccgcagcagcgcgctccactggtagtagccgcgcgcggtgccctcgtccgccccggcgagcgccgcttcgccctgggtctggtagcgcgcatcgagcaggcgcaaggtattgtcggcgcgttcgatgaaggttccgagacggatgaagcggaacgcatcgttgcgcatgctggtggcgaaggtcgcgccgcggaacaggtgcgagcggtccttcacccattcgcagaaacgactgatgccatagcgcaggatgccctcggcggcgatgccgcgcatttccagccaggtggcgttgatgttctcccacatgtccagggtgatccgcccgcgtaccgcatgggcactggcccgcgctgcggccaggcagctgtagatgctcgccgggttgtccgggtcgagggcgaagaaactcagcaggcgctcggcggccagttcgccgtggcgctccaggtaggcgtcgagggtgccggtgatcagcagcggcatggccagttcgtccaggccgccaccgttgcggtcctgcggcaacagcgacagcgagtagctgacgtcgagcatgcgggcgaggttctccgcgcgttccaggtagcgcgacatccagtacaggtcggaagcggtccggctgagcatgcttattcctccaccacccaggtgtccttggtgccgccgccctgggacgaattgaccaccagcgagccttcgcgcaacgccacccgggtcagcccgccaggcaccaggcgaacccgatccggcgccgacaggacgaacggccgcaggtcgatatggcgcggcgcgacgccgctctcgacgaaggtcggacaggtcgacagggacagcgtcggttgcgcgatataggcctccgggcgagccttcaggcgctcgcggaacagctcgatttcctcccggctggccgccggtccgaccagcatgccgtagccgccggaaccctgggtctccttcaccaccagctccggcaggtgcgccaggacgtgcgccagttccttcggcttgcgacattgccaggtcggcacgttgtgcagtagcgggtcttcgccgaggtagaagcggatcatgtccggcacgtagggatagatcgacttgtcgtcggccaccccggtaccgatcgcgttggccagcaccaggttgccggcccggtaggcggccagcaggccgggcacgccgagcagcgaatccgggttgaacgccagcgggtcgaggaaggcgtcgtcgatccttcggtagatcacgtccaccggttgcggtccggccgtcgtgcgcatgtagacccgctcgtcgcggacgaacagatcggcgccttcgaccagttccacgcccatctcgcgggcgaggaaggcgtgttcgaagtaggcgctgttgaaacgtcccggcgtcaataccaccacgctcggcgattcgacgtcactggcccgctttagggtgtcgagcagcaggtccgggtagtggtcgatcggcgccacgcgctggcggacgaacagctcggggaacaggcgcatcatcatcttgcgattttccagcatgtaggaaacaccgctgggcgtgcgcaggttgtcctccagcacgtagtagttgccgctgccgtcgcggaccaggtcgaccccggcaatgtgcgcgtagacgttgcccggcaggtccagtccctgcatcgccagttggtactggtcgttggccaggacctgctcggcaggaatcaccccggccttgaggatgcgctgttcgtggtagaggtcggcgaggaacaggttcagcgcctggacgcgctggatgcagccggcctcgatgtgcgcccactccgccgcgggaatgctgcgcgggatggtgtcgaaggggatcaggcgctcggtgccctgctcgtcgccgtacagggtgaaggtgatgccggcgcggtggaacagcaggtcggcttcacgccggcgttgcagcagttgctcttcaggggtgtcggccagccagcgagcgaattcccgataatgcgagcggcattcgccgccagcatcgtgcatctcgtcataaaacatgcgtgccatgccggactccttgtcgtcacgaacgatggggaactcgcaaagcccgtgccagcgcgcggatcacggctcgtcggcgattcgcagggtcggcgcggcgggttcgccccagtctggtgcatcctgcccacaaggagaggaagggcgccccgttcgacggcatgcgcgccccgcggccacggaccggcatcgacctgccgatcgcgaagcgacctgtgggaccgataagtctagaacagacccggaagggagacggcttatcccctcccttccatgcagacagccgtctcgctcgaacgagcgataaagcggaccggcggtagtgccaggggggcgcccgcggccgggaaggtcaatcgatcagcgacagccaatgacggtagaaaccctcggccacccgattcagcccggcaatcctggcaggcaatccggccagcatgtcctcggcggattgctggctgggctgggagggatcgagcaggtgcggccagccggcgatccagcgccgcaccagttcctcggtcatttccggatggccttgcaggccgagtacgtgaccaccccaggaaaacccctggttctcgcaccacgggctggacagcaggcgctcggcgccctgcggcaggtcgaaggcatcgccatgccactggaagatcgagaagcgctccggcagcccggccagccatggactgtcgcggctttcccgctgcatgggctgccagcccatttcggtgtagggctgttgccgcaccgtcgcgcccagggcgcgggccagcaactggccgccgaggcaatggccgatcagcgggatgcgccgctcgatgaagcgacgcagcagcgccagttcgtcgcgcaaccagggcaggtcgtcgttgacgctcatcggcccacccatgatcgccaccgctcgcgggcgttcggcgtcgagaccggcgagttcgccgaggtcggcgcggatcacgcggaagtccaggccgcgctccgccagcacggcacccagatggcctggcggacagaactcggcatgggtcaggatcagaatatcgctcatggcttacctccttccccagtctgaaggaaagccttcgaggaaggaaagcccgacgcaggagccccggcccgggatcgcggccggggtcccgccgccgtcacggacgcagcgaagtgacctcctgggtcacgccccacccgtccagcacgccgcccagcggcaccacgacttcctccaggtcgtgttcgaaggcaccgatggcggcatgggtggcatacatcaccttgctgacctgcaggttccaggagccatcgtcgcgagcgacgacctgggccctgagggattcgccgcgaaactggcccgctgcctggcgggcctcccgctcactgggaaagatggcgaagaagtcgatgggatggatgcgcgcgaagtcgaagccgccttctttcatgcgacgcaggacattcacgctgacatcatccgagaagggcttttccatgagacgcacctcctgtcgagacattcagaaagttcaccgattccccattcagctgaagccatcgtcggcgatcatgagagttttttgatcaagccagaggaagatcggacgaccatggcttctttcagggtagcgtcaacctgccagcgctgccgagctttccgccgcctgccccggcgggcggcgaccggcggcagacaaagcgctgtacaaaaggcccggccgttgagcaagattccgcctgcgccggcgaccgttggtcctgcccgatggcattggcgaaagcgactcgtgcaataatatcaggttgatatcaaccacttctctcccgctatcccgttcggacgctttcatgcttatcagcagctacaaccaggttcttgtcgccttttccctgattgtggccatcctggcgtcctacaccgctctcgacatggccggccgggtgaccctggcgaaaggccgcgaggcgctctcctggctgatcggcggcgctttcgccatgggcttcggcatctggtcgatgcatttcgtcggcatgctcgccttcagcctgccgatcccgctcggctacgacctgggcctgaccctgctgtcgctgctgctggccgtcggcagttcggccttcgccctctggctggtgtgccaggcggaactcccctggcaacgcctggcgctgggcgccctgctgatgggcagcggcatcgccgccatgcactacaccgggatggccgccctgctgatgatgccggggatcgtctacgacccgctgtggctcggcctctccatcctgatcgcggtgatcgcctccggcgccgcgctgtggatcgccttccgcctgcgccatggcagccggcgcatcgtcctggtccgcgccggcgccgccctggtgatgggctgcgccatcgtcggcatgcactacaccgggatggccgccgcgcagttccccctgggcagcttctgcggcgccgccggccgaggcatcgacaacggctggctggcggtgctggtcatcgtgatcaccctggcggtgatcgccatcgccctgatcgtctcggtgctggactcgcgcctcgaggcacgtacctcggtgctcgccacctccctcgcacgagccaaccgcgagctgatccagttggccctgcacgacaacctgaccaagctgcccaaccgcatgctcctcgacgaccgcctggagcaggcgatccagcaggcgatccgcgacgatcgccggttcgccgtgctgttcatggacctggacggcttcaaggcggtcaacgatgcctacggccatcacctcggcgacctgttgctgatcgaagtcgccgagcgtatccgcgccaacgtccgcgcccaggacaccatcgcccgcctcggcggcgacgagttcgtcctgctgatcgaggcccgagagcccgccgacgccgcgaccctggccgagaagctggtgaagcggatcagccagccgtaccagatatcccgccacgaggtgcggatctcggcgagcatcggcatcgcgctctaccccggcgacgggcagacccgccacgagctgatgatcaatgccgacgcggcgatgtatcacgccaaggaccagggacggaacggctactgcttcttcgagagttcgatgaacgccaacgcccaggaacagttgcaactactgcatgacctgcgccaggccctggagcgccggcaactggtcttgcactaccagcccaaggtactggcgccgaacggaccgatgatcggcgtggaagcgctgctgcgctgggagcatccgcaacacgggctgatcacccccggccagttcctgccgctggcggaaaagaccggcctgatcgtgcagatcggcgagtgggtgctcgacgaagcctgtcggcagatgcgcctctggctggacggcggacatgcggactggaacatcgcggtgaacctttcggccctgcagttcgcccatgccggcctggtcgactcggtacgcaacgcactcctgcgccacagcctggagcccagccacctgatcctcgaggtgaccgaatcgaccgccatgcgcgatgccgatgccagcctggtgatcctcgagcagttgtcggcgatgggcgtcggcatctccatcgacgacttcggcaccggctactccagcctgctgtatctcaaacgcctgccggcgagcgaactgaagatcgaccgtggcttcatcaacgagctggcccacgacagcgacgacgccgcgatcgtctcggcgatcgtcgccctcggccgcacgctgaacctgaagatcgtcgccgagggcgtggaaaccgaggcccagcaggagttcctgacccgcctcggctgcaattcgctgcaaggcttcctgctcggcaggccgatgccggccgagcagttgctcgccagcgtcgcctgagcgccgccagcggcgcgccacgggacctgtcagaaccggcagattcgcccatcgccgtctcgttgacttccgcccgcgctgcgaacaccttatgtcgcgcccgccgggcggcatgccgcgacatgtcacgccgccacgacgagcgtctatccaataacgagaaaacatgcatgaacaggctgtgtgtactggggcttctcatcgggctgagcgggagcccggcactggcggctggccagggcgaatccggcaatccgccggccaccgacaaggagcgtttcatcgccagcctgatggctcgcatgagcaacgcggaaaagatcggccagctacgcctggtcagcgtcggcgccgaccatcccaaggaagcgctgatggcggatatccgcgccggcaaggtcggcgccatattcaataccgtgacccgcccggacattcgcgccatgcaggaccaggtccgccatagccgcctgaagatcccgctgttccatgcctacgacgtggcccacgggcaccgcaccatctttcccatcagcctcggcctggccgccagctgggaccccgaggtggtcgcccgcagcgcgcggatctccgccctcgaagccagcgccgacgggctcgacatgagcttctcgcctatggtcgacatcacccgcgacgcgcgctgggggcgggtctcggaaggcttcggcgaagacacctacctgacctcgctgctgtccggcgtgatggtccgtgcctaccagggctccaacctggccgccccggacagcatcatggcggcggtcaagcacttcgccctgtacggcgcggccgaaggcggccgcgactacaacaccgtggacatgagcctgccgcgcatgttccaggactacctgccgccctacaaggccgcggtggacgccggcgccggcgcggtgatggtctcgctgaacaccatcaacggcgtgcccgccaccgccaaccgctggctgctgaccgacctgttgcgccagcagtggggcttcaaggggctgaccatcagtgaccacggcgcggtgaaggaactgatcaagcacggcctcgccggcaacgagcgggacgccacgcgcctggcgatccaggccggtgtcgacatgaacatgaacgacgatctctactcgacctggctaccgaagctgctggcggccggcgagatcgaccaggccgacatcgatcgcgcctgccgcgacgtgctggcggcgaagtacgacctcggcctgttcgccgatccctaccggcgcctgggcaagccggacgacccgccgttcgacaccaacgccgagagccgcctgcaccgccaggccgcccgcgaggtggctcgcgaaggactggtcctgctgaagaaccgcgacggtctgctgccgctgaagaaacaggggcggatcgccgtgatcggccccctggccaagagccagcgcgacgtcatcggcagttggtcggcagccggcgtgccacgccaggcggtaaccgtctaccagggcctggccaatgccgtcggcgagcgtgccaccctgctctacgccaagggtgccaacgtcagtggcgaccaggcgatcctcgactacctgaacagctacaacccggaagtcgaggtcgatccgcgctccgccgaggcgatgctcgaggaggccttgcgcaccgcgcgcgacgccgacctggtggtcgccgtggtcggcgaatcgcagggcatggcccacgaggcctccagtcgcaccgacctgcgcatcccggccagccagcggcggctgctgaaggcactgaaggccaccggcaagccgctggtgctggtgctgatgaacggccgaccgctgtcgctgggctgggagcaggaaaacgccgatgcgatcctggaaacctggttcagtggcaccgaaggcggcaatgccatcgccgacgtgctgttcggcgagcacaaccccagcggcaagctgaccatgtccttcccgcgctcggtgggccaggtaccggtctactacaaccacctgaacaccggccggccgatggaccacgacaaccccggcaaatacacctcgcgctatttcgacgaagccaacggcccgctctacccgttcggctacggcctcagctacaccgagttcagtctctcgcccctgcgcctgtccagcgaacggctggcccgcggcgctaccctggaagcgcgggtcacgctcagcaacagcggcaagcgcgccggcgccacggtggtccagctttatctgcaggacccggtcgccagcctcagccgtccggtgaaggaactgcgcgggttccgcaaggtgatgctggagcccggcgaatcgcgggagatcgtcttccgcctcggcgaggcagacctgaagttctacgacagccaactcaggcacacggccgagccgggcgagttcaaggtcttcgtcggcctggattcggcgcaaaccgaaagccgcagcttcaccctgctctgaaggcgccgaccgcaccgccagcgtcgccgccgcgggcgaacggcagcgtctcagccctcggcccggagccaacgcccgggccgggggcggcgcctggttccctcaaccggcgtccccttcctcctcgccgctccgcgccacgctctccgtcaatgcggcctgcaacgccgccaactggctgtcgagcgaagcgtcgatgatcccgatctcggtttccaggatgcaaccgccctggtccagccgggcatcgccgaccacttccaggtagcccacctcggggaaatccttgagcacccgggcgacctgctcgcgcaccgcggccagttgttccggctggacgtgcaggatcacctgcttctggttgctcaccaatgccagtgcctcgcgcgtggccgccagggtcagctcgacagcgtcgtagtggcgcaacaccttgcgcaccgcctgcagcaccacctcgccaagctggcgatcgacctgccggtagtagcgattgcagcgcagtagcgtttcctggatcagcccggcctggcgcagacgcgcctcctccagtccggcctcccagcccaggcgcttctgctcctggtaaacctcgtgggcctcgcgctcgatttcggcggcacgctcgcgggccgcttccaccaggcggttggcgctgaggtagtcctggtagtcgcgggcgcgcaacagggcctgcccgggggccagccgtacgcgactggcgtctagttcaacaaatggaagcattcatcgctcgcttgtcgggcgaccttcaggcacagggtccgcgccagggatcgccgttgttcgtcgaaggtccagtccgccggggccggcatggcctccaggcgcaggcgcaggcgccgcgagaaaccgcagtcggcatcgctacaggcggccagccagaaagccaggccgcagcgccggaaatagccttcttccgggttttccggcaaggcccgctgccagccgggcggccagcgaccgatgagcaggtcgagctgctccaggcagaaacgctggccctgttcgccgatctgcgcgcggatgcgccgtacccgcgcaccgtccagcacctgccgcaaggcctggccgtgcagcagcgcgccgagccagcccagggtccgttccagcgccgcctgcgggtaaagggccagcccgcccagttgcgcgggcatgcggaacgcgcagtccaattccagttgctccagcagccaggcgttgagaacgctctgtcgccgccagtccggcagcgccggcagcaaccgcagcaataccgcgggcaggtgcgactcgtggatgtagcgggccgggcagaagcgcaactggtaggccgtcaatggcatcgcgccgctcagccccgttgccggtgccagaagaactgcgccaggttgctcgccagcagcaacgccagcagcaggccgaacaggccgagcaggcgtccgcgcgagtgctccgccacctggatcgagaagacactctcgaagcgtggcgccagcgggacctggcggaccccggccgacggcaccagcaccacgctgatgcggtcgtagctgagtccttcgatgccgttgttcaccagttgcttgatctgcggcacgtaggcatccagttgcacgtcggcggcgtgcttgatgaacaccgaggccgatgccggcgaggacttcctgcccagtccgtcgcgctcctctggcagcaccacatggacccgcgccaccagcacgccatcgatctcggaaagggtatgggaaatctcctgggccttggcgtagttgagccgcgcgcgctcttcgatgggcgaggaaatcagcccgtccttgggaaacacatccttcagcgtggagaagttctcccgcggatagcccttgcgcttgagcacctccaccgcctcggcgatatccgattcctccaccagcaggcgcacggtgccatccttgtccgcctgcttgtccgcggaaacgccctccgaacgcaacagcgccagcatctcgttaccttccttctggctgatcccggtatagagttcgaccttgcacccgcccaacgccaggaccagcgccaggagcgccatgcgcgacagacctttcaccgttcgcctcattgggtcttcatcagggtttcgacgttctggctcatgcgcccgacggtcttggcgatcagctcttcctgcatggtgatgcgcatcagcgaccactgcatctgcatcaggctgttgggatcgtcgccgggcgtcgacagctccacctgcaactcctgcttggcctggctgaaacgctccctgatctgccccagttcgctgagcaggtcgccgcccaggctgccggcaccgcccatcgcccgttcgaactcggcgacgtgggccgcgccggccgggccgccggagagttcttcgagactggtgatctgcgcctgggcgcccatccgagagatatccatcatgactccaggtcgagtttgtggctgttgcgcacgaggttgtcgagcatgccgttgagcgggatcagcacctgcaattcgcgacgcgccagttgcgccaggtattcgccgcccggcgcatgctcgactgcaccgagcaactggaggagaaaggtttgctgctggcgtcccagcggcagttccgcacggagcatcgccttcagctccaggcggtccgcctccaacccttgcagcggctgggcaaagcgctgcagcaggcgctcgccgagagcgccgttctccaacccggccaggcggcgtccggccgcctgcggctcgccgccgagggcctgctcgaaagccagcacctgatcgacagccggcaggttcgccgcctttggactggccgacggatagacggcgaatcccggcggcgtgtcgatgcggctcatgtccgcacctgggcgcgcatgccggcggcgaagtcggccagggcaggatcgctgctgccgcccagcccggccagcctgcggtccagcgcggcgcccagccccaggtgccactcgcacaaggcgaaccagggctccagcgccggccagggattgccatgggcgaaggccagggcttcctgatagcgcccctggttggccaggctggaaatccggatcagccgcgccgcttcgtcctgtccgaggcgctccagccactcggcgatgcacagcgcctcttcgtggcagtgctgcccgctgccggccagcgccagttccgccaattcgcgtatcagtgaagtgtccatgttcagatcttctgcaggatgccttgcatcaggtcgcgcagcgcacgggtcaccgtcgagttgatgttgtagatgaccgaccacttgttgatcttgtgttgcaactcggccagcagcgccgggttgtcggcattgtcggtcccctgcaaggccttgatcgcttcgttgacgtccttgttcgctgcgttggcctgctccttcagggcattggccacggtatcgagggtattccccgggttggggttgaatatctgcgccatgcttagtcctctgtgagctgcgaaagaatgccgagaccgccttcgagggcccgggcctgctgttgcaggaactggaagcgctccgggccggcgcctctggccagttcccggcgacactccgccagcgccgcctgcagacgctgccggagcgctgcggcatgcgtgccgtcagcgaccgacagtcgcgtttccaaggctgtcatcatggagcacctcccctttgagattgatgatgaaacgctgcttgccgcgggccaccaggatcgactccggctcgatggcgaggattcgcacaccgcgggatgtcgaggcgcccaccgggtatttctggccgtcgccgagcactacatagggcacccgccccagcgacaccgagcgaatcgtgaactccagttcgtcgccgctggcgcgcttgccgcgactgagcagctccaggctcgggcggttgccgaattcctgctggaactcgcgctgcaggcggtagaaggcgctgagctggacctcgtcgagcgtgccgctcaactcgatgcgctcgccgcgctcgcggaaactcagttgccggtcgaggccggcgtccgccagcaggcgctcgaggcggcgcaggtgcgagccggccacccggacctggttttccaccccgagcaggcccggcacctcggactccagcaatgcgtcgatccgcgcccagcgttcgtcctgttccgccagttcgccgttgagccggacccagccaggcttgtccgcgttgctgctgaggatctgccgatagccgaatttctgcaggatgaaatccacgccctggcgaatgtcttccatgctccgtgcttccagtcggtagtccacgccgctgccatcgaggtagcgctgcagcgccaggcgccgagcgttgtcctccaggtagccgccaagcaggagactgtcgccctggcgctgcacatccacctcgctcatgccctgctcgcgcaggtaggcgcgcaccttcgccaggggctcctcgccagccatgccgtgctggcgggccgaccagggttcgacgagcatgcccagcaggcacagggccagcgccaggctgatgccgagcagccagaccccgccggcacgggcggacggcttgcggcgcactggcgcggtctgcacctcggcttcggggaaacgctcgggaaaacgccgctgcgggtcgcagaatgcccagcgcagcgggccgcaggtctgcccggcaagcgcctgcaggatcgctccggcgacttgcgcctggccgtcctggcgaggctcgcagccctccgcccactccagcaggcgcacgccctgggcatcgacctcgagcaccaggtggactgccgcgatgccctcgtcgagcaacaccaggtcggcctgcaacggatcgctgccaagcgccacccggccctctccgagcgagacttcggcgccctggttcagcccgctgtagaagcggatcttccaggccatgctaattcccgcgctccgcgccgacgcaccaggcgccgtccttgggacaggcgccgtcggtcacccgccagccctcctgcgcacccatccggcagggcgtgaggaacgaaccctgcccggcctggcgcaagcgctcctgttcggccctggccggcgccagcgcctggcagcgggcgctaccgagcagcttgcgcaacgacaggctctggttcgacaactcgtcgatttcaagcaggccgccgcgcaggtcgcgacggttgttcagcgccaggtaatggccgacgccatcgtcgatcagccgcggctcgatgaggaacagccgcaccgagcggcgcacggtgtccgcggtagtgcggaacagcgcgccgagatagggaatgtcgccgagccagggtaccttgcgctggctctggctcagttcgtcgcggtagatgccgccgatcagcaggctctggccatggcccacgcgggcgatggtatcgatcaccgtgcggttgatcgtggggatcttgtccaggccggcgctattgggtttctggctgccgtcctcgatgtgcaggctgaggctgatctccggcgtatcgccgagagtcaccactcgcggcgtcattttcagcatggtgccgtaggtgatcgccttcagctcggccacccgctcgcccgtgacccgcacatagtaggtttcgctctggtcgagcaccgcctgggtattctcctgggtcagcagggtcggccgggatccgatctgcgcctgtccctggctctgcaacagggtgaccttggccagcaggaaatccagcccgcgactgtccaccaggctgccgaccgccccgttaccagcgccgccgccctcctcgctatcctggccggtggtgcggatctggatcgacttgttgttgcccaggcgaatcccggcgctccagtcgacgcccagctgggcgaggttctcggcattgatgtcgatgatcgacaagccgacctcgatccgcgccgagggccggtcgagggcttcgatcaggcggcgatacatgggcaaccggtccttgtggtcgcgcaccaccaccgcgttcagcgacggttccgcctggaccaccgcatggctcgattgcggtcccgggcgcagcttgcccggctcgtcgcccaccgcaaccacgttggcatcgctgagcacccgcgagaggatgctggcgatgcccggcgcctcgatctcgtcgtcgcggtactcgatcttgcggtcctcggcgaccgcatagcgcagcgggaagatctccacgctgaggtcgccggtcttttcgctgcgcagggtgtattgctgctccagcacctgggcggtctgctcgaccagttcgagatagcgccccggaccggacacgtgcaccagccgcccggaagggtcggcacgccagccgaagcgcggctcccagatgccggcggcggtcagcgcgcgcttcagctcggcctcgccgacctgctccagcctcaccagccgcgattgcatctcggtggtcttgaatacgtacagcacggtgccgtcgtagtaccagccgaggttgtagagggaggccatcaactgcaggaaggcctgcgggctttccaggtcgaagcgaccgctgacctggtcgttgaccttgtcgctgacgatcaccgaggcatcgtagttggcgccgaagttggccagcacgtcgcgcaggctttcgccctgcgccacatagtcgtaaggcaggctgggccagtccagcggctgcgcgcgcaagaccgcgccaggcagcagcgccagcagtccgccgatcagcaggcggcgcatcagggacgccacaccggagcctgcggcggcaacccgcggggcagcggttccagctccggcgccagcgcctcgagcagccccacctgggcggccagggcccgttcgagtcgctcgggatcgaggccgtcgaggcccagccgcgcctgcaacagcaggcgcccgtccgcgtccaggacaatggcctggggatagcgccgactccaactggcgacccgcgacaacagcacccgcagcaacccctgctggtcgcgctgcgggtccaggggggcgtgctccagcgggctttccagcagcaggtcgtcgccctggcgcagcaacaggacgctctgtccgtcgatgcgcaggtggtacgaacccgtccgatcggcaacaaagggcccttggcccaggcgagtggccaatccgctcaacagatgatccatgattcctcggtagggccggctttcgccggccgctcagctctgccagtagaagtgatcctgtgcctggcacaggttgcgttcgtgcagccaggcctggacggcgtccgccgcgccgacgtcgtcgtccagccggcagagaggttgccagaggcattcgaggacctcggggatcggctcgaagccggccagcccgccgctggcgagcagcgtcgccatgccccgctgccagttcggccaggcgctcttcgccagtgccgaagccgtctccagcttgccggccagttcggccacctgttcctgggtgcgcgcctggcacttggcgaccctggccagttcctcgcgggcctgctccggctccagctcggccacgcgggaccagaattcggacttgactcgcagttgccgggactgggtctccagctccaccagcgacaggcgccagccggggatcgcctggtcgagcaggctttcccaccagccatagaccggcagcaggacccaatcgatcatcgactgcggcacggcgaggttgacccggtcgcccagttcggcgcaccagccgtcgtcgtcctgcgccgcgcagaggagaatctgccgcacctcttcgcgccccagcgccaggccgcgcgccaggcgctgctgcaaccactcgcagcggaacagttgctccagccgcaggcgcggcagcatccgctgcagcaacgccagttgccgcgcactgatgattccggactcacgatacaaactgctcgatgcgtaacccggcacccgaccccgcgagcgggcgtccgagcccaccacggatacccgcctgccagcgaacaccgcttctcgggagtattgcttatcgtcttcctgctccattctctgccttggcttcctcactacattgcgcgctcgtcagagcctgcaatttgggccgattctactcatgcagccgctaccgggctttcaaaaaacgtcagttatttttagcccggcattcgtccttcccctgccgcgagcggctcggtgtgcagccgaaacggcggcgatagctctgggtgaaataggactgactggaaaagcccgcctccatggcgatatcgacgatgctcatgtcgctgttgagcagcaactgatgggcatagaggattctccgctcgctgatccaggcgcgcggcgaaaccccatagacactgccgaacagctccttgaaggtggtcagccccatgccgaactcgcgggagaagtcggacagcttccactcgttgaggtagtgcttctccatgaatagctgcagacgctcgacatgccggttgctcagttgccgcaggaccgacatcagcagcggcccctgcggactgaacgcgaagagcatcagcaactcctcgatcttcaggcaggcgagcatcggcggatgctcatgcacaagcaattccttcaaccccttgacgcaaccggccagcagaggcgtggcagcgaacgcgatgatgcccggcacgggctcgtcgcaacgctcgacttcactcaacagcgcgccgaagcgctggacgaagccttgtagaaactgggcagataatggaatccagagtattcggctgtcctttcccttggtacttacgacatagcttccgcggcggacgaaaagcaactcgccaggcgccaggcaaaaagtggaatcgatgtcctggacggtcagttcgccctcgagcagaacatatacgccctcttccttgtttaccctgtattcgaaagttggaatgttccaatgacaagacgttatctgctttcggccaagagatttggctccttgcatattataagaaccccaacacttcccgtcgtaccttgaatgccccgcctagcggagaggcatgaatacgctccgttttattgattttcaaagccatgagcacggagtcgattttataataatcaggattatccgacgtgcgctgattcgcagagcgagtcggcttccgccaattaatccagccttctttagaagcggaacaaaagtaccagttttattattcgaggccttccctgaaaacgaacgagacttgcacttctttaatctccatacgcactttccgaaacagcaggcaatgtatcaatcgttgccagatctttcttccgggcgagcggccgtacaattcggaaaacagtcgcgccgaaccagccggacccgctcatcgacgcccgccgccacctgttgccaggcactcgcctggaccgccgcgacgcccacccaggaaagctcggtacgcaggtacaatgcctcgccctccaacctgtcgacctccagatcgaaggcatagcgcaacggcaacccggacacccagtagcgccgctcggcaatcgtttgcatccttccctgaacgacggcatacaggcgcagcctgagttgcgcctggcgcgcctgcagggaaacgccgcccaccgaaccacccaccgtcaccttcggcgacatcggcgcgggctggctgacgcaaccgccgagcagcaacgccagcggcaacagcatccagcacctcacctgcgccggaccgtgcgcgcctccagcggcgtgccgtcaccgtcggcgagacgctgcaaggcctgctcactacgcggatcgccagccacgttgcgcgccagccagcgcgccagcccggccacgctggaacggtcctcgccgcgaacggccgcgcgggtcaccgaacgcccctcgaaatgccccaccgcctcggctccagtgtcttgggacggctgcaccggcgaaatcgattcgattttcatggggccgctcaaaccctcatgccgaccgcagcgaccgcctcgcgatcactgtcgcacggcagcaggcgctgccagaactcggcgtgatcgagcaggttggccaaggtcgcctcgaagcattcgagggtcagttgcgctgcgagaatctgcgcatacaactggaccttgccggtcagctcgtcgaagccgaaatgcagatcgaaacggtgccaatggcggttgaagctggcgagctggcgaaagatcccctcgcccagcacatcgatgcccgccacatcggcctccagcaacagacgctcgcgctcggcgagcagcaacagggtgacgcccacctgttcgtcgaacaggaggctcgccatgccctcctcgtcgagggacagggaaggcaaaccgatacggcctgcgaactcggcaagcagtcggttgaccttgctcgttaaatccatgggggcgcctcctaaagctcagcgcatgctagcaccgggctatgcatcgcttttgtcactgagagacttttcttttaagaaaaaagccacatcgctgtggccttttcctcccgcgcggagacggctcagaccactccggccgccgcacgccaggcctggttatggctctgagtgtactgctggatgagctgcaggacgtccttcatgaagccggcatcgaagctcatctggtcctcgaccttctgcttctggctctgcccgatggtggcgttgacctctccttcccgagcgctcgcctgcgattcgccctggcgcacctggaccgaggcgttggccatctggacgaaggactggatcaccgtgttggccacctgcagggcgccgttgcggctctcgaaggcacggcccgccgcacgcaacgccacactgtcctgcacctggtccgccacccagaccttgccgacgatcttgcgatcctcgtcggaggtcttgccaagcgcctgcatcttcgcgtcgatcagttcgttgcgcccatcgatgttcttctgcagggtcttctcctgactgatggccttgccgttcttcaacgcgccgaggctgccgaccaccgccgaggccaatgcgccgacgccagcgatcaccgccatggcgatcatcagcgtggcgccgctgcgcatctcgtccacctgcgccttctgcgcgtggatgatcgactggttctcgttgtcgcgctggagcacgcccagctcgcgcgctttctgcgcgatgcggaagagaatcagcagaagctcgacgctgctgtccagctcgctgccggccgcttccatgcgcaccgggtcgagcacctggcgcggagcgttcagttcgacccggtcggcccgcgcggccggcacctgcggcagctccgcagccgcttgcggcgtgccgacggaacgcccggcggcgccgggagcgatcggctcggaggggatcgcggcctgggtagccgccagggaatattgcgtgtcgatcatgtgacgtctcctcagatcgctgccggtcggctggacaggttgtgcagggtttcacccttggcctggagcatggcgaagatccgctccatgatttcctggaatgcttccagcatgcggctcagctcttccttcaggcgctcgatcacgccctgcagggtggtcaggtcggcacgcgattcctgcacgtcggcctggcggttcgcggccttcgcctggaatcccgaatgagtggcctgggccgcgccgttggcgacgtccagggacaggtcggaaacctgcacgccgagtttcagcgagtgcgacagcgattggccggccaaactgccgaacttgccgcccaggtcggcgaccttgctcgccaggctggcggtcatctcggccgccttgccgccgatcttcgcgcccagtctggccagcccgccgaccgctgagccgccgaagctgaccaccgccgccagcagcgcgacggcgatctcgatacccatcagtgccgggccgagcttttccatcacttccttgctgatcaatccgtccgcggctgcctgctgtaccgactgggagaccactcccatgacaccgcccgcgatcatcagtgcacccgcggccgcgccgacgccggttgccaccatgattgcgccgacgatgatcgaagctattgcactgatccaaccaaagattttggctgccagaccggacttctgggcttctttcgcggcttcttccgattccctgatcttctgctggttgtcttccatcttctgcaggttctgctttcgcgcctgctcgatttcggtcagcttgagtttcttctgctggttctcgacttcgccggtgattttcgccagctcgatctcgaacgcctgcggcgacatcaggccggcggacaacagcgtcgaagcgccggccagcacaacctgccgcgccagtccggcatcctcgcccactgcttgcaccaggctggcgatctccgcacgattggcgacctccaggcgctgctggctggctgcggacggcggcgtcagcgccacccccgtgccgctcgcggaagccgcggccggcgccgccaggcgctccacccgcagactctcgacatccctcgcgaccggcctgccgagcgccgggatatccccggcgtcggccaccccgtagggcagtccggcgcgttcaagcgttatcggattcatatgttcgatcctttctcgcggttacggcttccaacatggcgccggcacgcgcggccagggcctcgtgcgccggctgtgccgcggccagggcccgggccgagtagaagccactctcggctccgtcgagatcacccagttgcaggtggcactcggcggcatggaagggaaagcgcggctcgttgatgtccatcagcgcgccgtagctgtagctctgcagggcctgttcatagagaccgagggactggcggcaggcgcccagaccgagaaagtagcgggcgtcgtagtggtcgagcatgcacagtgcctggaagatcttctgcgcgtcgtcccacttgcccgcctggtactggttgaagcccagcgcatagagctgctccagggtgtcctcgctgagtccgcgaagcatcgccagggtgccgccgtcgcgcaggaaggcctccagcgcctgttgctggtcggtgtcggaaggggtcgcttgctggttcatggatacctctagatcgcgctgagaatgtcgcgcaggacgctgtcgtatttctggatgaagcggttgagcgcctcgaccgccgagttgtagcgggagctggtgtcgttgagcagggtggtcttctcgttgaccttgtcgttcagcggacgcgagcggtcgctcaccgtggtggcgaaattgccgaccgggttgttgtccttctcgaaggggtactcatccttgaggcccttgagttccccgctctgcttcggcgagccgctgagaaaatccttgatcgacagcttgccgctgaaggtatccagattgctcagcaacgcatactcggggctgtccttccacctgggatcgccgacggcatagccatagagcgtggggtcgaccagatcgataccgccagcgtcgatcctgatgccctgcttggccgacagcgcggcgttgatctgcgactggatcacgctgtagaccttcaactccgcggtcagcgccttgagctcgtcgagcagcgccttgcgcttgccgtcctgggtctgcaggacatccttgtagacaccgatgacattctcgtcgagacggccgtgcaggctgaaataggccgacaccaggaactcgcgcaaatcccactgcgcaccgggctgccgacgtgcctgcaggacttcgcggagtacctcgaggccctgccccggaggcgcggacggattggccgcgagcaaccaggcgagcgccttgagcacttgcgcctcgctcagcggctggccggcgtgggccagcacgatccgctcgctgcgcaacaaggccagcagttcctcctgctcggcactggcaggcgccgccggcgcggccaggagttcgtccaggaacagctcgcgagcggcattaaggtttctgacttccatcgtgattcctcagatcaacaagccacgcatcggcgtcggacgccgcggccgggtaccctgctcgccctgcgtcggctgggaactgcgcatgcgccgcagttcggccagcagctcctcttcggcggctcgcgccagctctcgctccggcgccaggaacagcagctcgccggcgtccgcggcaagccccaggccttgccacatttccgccagcaggcggccgcgttcctcgctgtcgcgaatcgccagttcggcggcctggacggtcgcccgcagggtgtcttcggtgtattcgttcatgtcgcccatggtagggatcgacgtcgccggagcctgtcaggcacggtcgggtttttgtcgttttcgcaggcttcgctgcgtcaccacccgcccggcctccagctcgaaccagccgtcggcgggctcggcggcgccggtccagcggcgatagaagcgcgccatgcgctcgccaggcagcgggctgccggccagcgccaggaccttgccgtagagacgctggcgcggccccagcgtatcgagcgtggcctccgccaacaggtacagcgcggcgaatggattggccaatccgctgcgcgcctgccgccgacgcaacatcacgatccagacccgctcgccgtcgcagcgccaggccagttcgcagccatgggccaggacctgccagccgagcgcgatcgaggtgtcgcgcaggcaatgcggacgcaccgccaggccgcgggcgagaaaccagggaatcagcggatcggcgctcacaacacgatcctgccaagcggctggatgttgatctgctgggtcagctcctggtaggacagcaccggcagcccggcatagtcgctctccaccaacttgcgcacgtagcggcggatatccatggaaacgatcagcaccggccggttctgcatctgcgcgagatcgccgacggtctgccgcacgcgctcgaggaaggcctgggttatcgccgggtcgagggccaggtagctgccggcgctggtctggcggatgccaccgcggatctgctcctccaccgcctggtccagcagataggcgggaaggatattgttgccgctggagtacttgtagcagatgtagcgcttgaggctgctgcggatgtactcggtgagctgcaccacgtccttctccttctgcccccactccaccatcgcctcgaggatcgcccgcatgttgcggatcgagatgtcctcgccgaccaggcgctggagaatctcggtcatccgctgcaggggaacgatccgctgcgcctccttcaccagctcgccgtaaccctgctccatctgctccagcaggtagcgcgtctcctggatgccgatgaaatcctcggcgtactcccgcagcacatgggacaggtgccaggtgagcacctgctccaggcccaggcaggcacagccggaacgctccaggcgatcctgatgcgcctgctccacccagctcgcctcttctcccggcacctgcagctccgccggctcgtgggggaccgcgagcagttccagctgcgcggcgcgttcgcgcaccagcaaccagcccggccgcaggcatccgcgcgcgaccgggacctcctgtagctgcaccaggtattcgccatcgcccatcgcttcattgaagcgcaagtggatacccgggaacggcacgccgaaatccaggtacagcgcgcgtcgtacccgcaccagctcctcgttcagcgacatcgcctcgagacgttcctggaggctggcatcgacgtcgatcagcaacggcacggtgagggcgaattcttcctgctcggcgagacgcccggccttcggcttgccgccgccagccttgccacgcgccttggccgatggcgctccggcgccctgcgcgagcagcgccggcaggtcgcgggaaccggcgctggcctgggcccgctggcgccagagcatgaagtagccgccgccgccaaccagcagcgcgagagccaggaaggtcagggtcgggaaaccgggaatcaggccgaacagcaccagcaacaggccgccgatcagcagcgccttgggctgcgccaccacctgttcgccgatgtcgctgccgaggtccgccgattcgtcggaagacacccgggtgacgatgatcccggcggtgatggcgatcagcaacgccggcacctgcgagaccatgccatcgccgacggtcagcaccgcgtacagttgcagcgcgtcggcggtgctcaggcccttctgcgtgacgccgatggcgatgccgccgaggatgttgacgacgataatgatcagcccggcgatggcgtcgcccttgacgaacttcatcgcgccgtccatggagccgaacatctggctttccttttcgatcaccgcgcgccgcgcccgcgcctcgttgacatcgatcacgccggcacgcatgtcgccgtcgatgctcatctgcttgcctggcatggcatccagggaaaagcgcgcgctgacctcggcgacccgctcggcacccttggtgatcaccaggaactgcacgatggtgatgatcaggaagatgatgatgcccaccaccaggttgccgccgaccacgaagctgccgaaggtgttgacgatctgccccgcgtcggcctgcagcaggatcatccgagtggtgctcaccgacagcgccaggcggaacagcgtggtgatcagcaacaccgccgggaacaccgagaactgcaacggcgagccgatgtacaccgacatcatcagcaggaccacggagatggtgatgttgacggcgatgaggatgtccagcagcagcggtggcagcggcagcaccatcatgaacaccaccgccagcagcaacaccaccagcaggatgtccttgcgctcgccgacccggccgagaagcccgctcaggtcgttcattcccgcgcctccagctccagcgcccgggcgtgcgcggcacgcgccgcgtcgagacgcccggcgagctgttcggcacgactcaggcaacgccacagaccgggctcctcctcgccatcctcctgcaactgccggcacaggcgcacggcgggctcgccgaggccttgctggagcaacgccaggagcaaggcgcggcgcccgtcgcggcgctccggcgcaacgctcagcaaggcctccagcaacacctgggcgcgtcgcggctggccgcattgcaggtgcaaccagcccagcatcagcaacaggcgctgttgcgtcggtttcaacgtcatcgattcataccttgtgcaacaggttcagggccatttgcagcagtcgctcgtcttcatcgcgctcgccgagcaggcaggccgcggcctgcagggccggctggcggggcagcgtgagggccaggcggagatcgcgcagcgcccggcggaagtcgccggggcgcagcaggccgtgcaactccagctgtggccgggcgtagtcgaacaggcgctgttgcgcctgctgcgcgggatacaggctggcgacgtgggtctccaccggccggccgtcgggcgccagcagatggcgctccggcaggggcggtgcgaacggctcggcatgcgccaggtcgagccgttcgatgccgatgtgccaggcaccgacccggctcatgcggcgagcacttcgctgcgcgccgagcgcagcgcctgcaaggcctggtgcagcgtcgggatgccgacctgccgggcttccagggtgatgcacagcagcaggcgcgattcgccgctccaggcgcaacgcagcggcaggctcccggccgcgcgcgcatggcacaggcgcaacgcccgcagggtgccgcgataggcctggtgccaggccaggtcacaggccagccagagcgacaactgttcgccatggcgttccagctgcaaggtgccgctgtcctcgaaatccagttgcaccacgcgcgccaacggcgccggtacgctcacccgcaggtcctggcagaactgcgcgacggccagctcaacccagtccatgctgctgctcctcttcgcgctcgatcgccaggtcgagtgccatctggcaggcattcaaaagattctggcgctgctcgtcgtcgccgaacacttcgaccggcaacaggcggtagagacgcttcagttcgcggaagaaatggatctgccgggcgacgtcggccagcggcaacggctcgagcaacgcctgcacctcggcgacgccgacccagcgcttctcgagcaaggcgatgactgcgccggtcaattcagaaggcccgtatgccatggccccgctcccccgtcaccagcacctgccagagcgcccccacctgctccgccaggccgccgagcacgcgcagcttgtgcatgtcgctcatgacccgctccagcttcaccggatcgagccggctcgactgactgtccaggtcggcgctcagggctttctgcaggaaggccacgacccgctccagcggcgtcgcggcgaagcgcgcctggatgtcctgccaggccgccgacaggccccggtagtcgagtaccgcgtcacggtaggtatcgcgcagcgcctggatatcgccgacaccggcggcggaagcctcggcggccagcggctcgatgcgcaggccgagttcgatctccaggccctgctcgtcggccatccgcagcaacgcctggtcgaccagcgccagcatcgcccgcgcctccggccgcccggccaggacgtcgcgcgcccgcgacagcgtcaggaagcgctggctgatctcgctggagaagccctccaggtaagcgctgagctgcgccaggctgctcagttgaccgctgcccaggtgggcgatcagcgcctcgagcttctgctggctttccaggtccggaatgcgcttccagtactcctgcagcatggcctggacttcgctcaggcgcgcatgggcgtcgctcaggcggcgcttggccagggatttctcggcgcgctcggaaaaggcgaaggtcagctcttccgcggcatcggccagcgactgcgaaacggaaacgtagtggacgcgctcgccctggaagctgccgccagcctgctgcgcgggggcgttggccgcttcccacggcgcgaggggcgcggcggaggaactctggaggatgtccatcgtggctgtggctcctggtctgcaaaggcggcgcagtataggaaccggcccggtgccgccgatgccaatatcggccggttttttttagccgcggcggcaaccgatttctaaaaactcccggctggcactgaaattcgtcgcgcgaggctttctctatagtgcgcgccgactccagccgaaccgacccgccatgcccgcgcctctctctcctctcatcgtccggatgcgccacgccatcgaaggctgccggccgatccagatccgcgggcgggtcacccaggtcaccggaaccctgctcaaggccgtggtgcccggcgtgcgcatcggcgaactctgccagttgcgcaatcccgaccagagcctggcactgctcgccgaggtcatcggcttccagcagcaccaggcgctgctcaccccgctcggcgagatgctcggggtttcctccaacaccgaagtcagccctaccggcggcatgcatcgcgtggcggttggcgagcacctgctcgggcaggtgctcgacggcctcggccgccccttcgacggcagcccgccggccgagccggcggcctggtatccggtctaccgggatgccccgcaaccgatgagccggcgcctgatagagcggccgctatcgctgggtgtgcgcgccatcgacggcctgctgacctgcggcgaaggccagcgcatgggcatcttcgctgccgccggcggcggcaagagcaccctgctggccagcctggtgcgcaatgccgaggtggatgtgacggtactcgccctggtcggcgaacgcggtcgcgaagtccgcgagttcatcgaaagcgacctcggcgaacaggggctgcgccgctcggtgctggtggtcgccacttccgaccgaccggcgatggagcgcgccaaggccggtttcgtcgccaccagcatcgccgagtatttccgcgaccagggacgccgcgtcctgctgctgatggactcgctgacccgcttcgccagggcccagcgcgaaatcggcctggcggccggtgaaccgcccacccgccgcggctatccgccatcggtgttcgccgcgctgccacgcctgatggagcgtgccgggcaatccgagcggggctcgatcaccgcgctctacaccgtgctggtggaaggcgacgacatgagcgagccggtggccgacgagacccgctcgattctcgacgggcacatcgtgctgtcgcgcaagctggccgccgccaaccactatccggccatcgacgtgctgcactcggtgagccgggtcatgaaccagatcgtcgacgacgatcagcgccatgcggccggacgcttgcgcgaatggctggcgaagtacgaggaagtcgagttgctgctgaagatcggcgaataccagaaaggccaggacagtgaagccgaccgggccatcgagaagatcgcggcgatccgccagtggctgcgccagggtacccacgaaaccagcgattacgcacaggcctgcgcgcagttgcggagcctctgcgcatgagcctggctctgctgttgcgcgtccgacgcctgcgcctggaccgggccgagcgcgcccagggccgccaattgctacgggttcgcgccgcggcgcaggaacacaccgagcgccaggcggcgcaacgggactaccgcgactggcgactggccgaagagcaacggctgtttctcgcctgccaggcggccatgctcgaccgccggcgcctggaagcctggcagcagcaggtagggctgctgcgggaaaaggaagccggcctggaacaggactgcgccgaggccgcgcagcgcctcgaaggggagcgcgagcgcctgcggcagtgccggcgagagctgctggaacgccagcggcaactggagaagttcgccgaactggagcgccacgtcgacgccgagcgccaggggctgcgcgaacgcagcgaggaaggcgaactggaagaattcacccgccacgagacctggccatgctcaagctgaacgccgtggatacggctccgctcgtgtcgtccgacacccttgccccccttccgccgctgcgcgcgcagcagatcgccttcgaacaggccctgcccgcgcaccgaccgccggcgcccaggccaccgttcgacaagggcgacgaaacgacggaggccgccgcgacagccgacgcgccgacctcgacgcctctcgccgaccagcccgcggcgcctgccgccgaccggccgccgaccactcggcaggcccccatgccagttgccgcggacgcaacgccaacgccaacgccaacgccaacgccaacgccaacgccaacgccaacgccaacgccaacgccaacgccaacagtgtcgccgtccggatcggtagcacggcaagcgccggcagtcaccgcgcgcgtcgcggcgtccacgcaaggccgggagccggccagcgtttcggcgcctccggtcgacgaaccgccgctggtgccggtgtcctcccacccgcaaatcgcaggtcggacgcatgagcggccacagcccggccccggcttcccggcgaaaaccgcagccgaggtcgcgtccacggcgcaggccagtgtccaggcttcgccgcccgcgccgacagcgggcggcgaaggccgcggagaggagcgtcggcaacccggagaaaccgatccatccgcactgccccccgacgaccaagcgcctgtgccactgcctgccatgcaaacccccggcgaccgcctgctggcacgcctgctggcatcgagcgggagccggccactgccgctggccgatctcgcgcgcctgctcgatgccgtgcaggggcgcatccaggtcgccagcgcagccgaaagccatgcggcgcgcctgcaggtgcgactgccccagctcggcgccgtggaggtgcaggtcctgcatggccatggccagttgcaggtcgagatcagtgccagccccggcagcctggcgtttctccagcaagcccgtggcgagttgctcgaacgcctgcaacggctgcatccggaacaaccggtgcaactcaccttcaaccagcagcaggacagcggccagcgctcgcggcaacgtcgctacctgcatgaagagtggcaagccgaatgaacggtacggacctcgacctgccgctcgccagccgcgccgaactggatctccagcgacgtctcgcgcgttgccgtcgccactatgccggcaacgctttgcaagcgcgcctggacatcgcccaggccgcccccgacgtcgatctcgaactgagcctggcgtgggacggcctgcccctgcgctttctctgccaggctccggcactggcccactggctcgcgccgaacctgcaggaggcagccttcgccagcctgccggcggccctgcaactggccttgctggagcgcgaaggcaacgtctttcccggcctggtctggtacggcctgagcccggcgcaaccacgcgctgcgatgggcctgcgcctgagcctggaacgcgacgaccagcgcctggcgctctggctcgacggcgatcccgcgacgctgctggcacgcctgccgccgcgcccctcggcgcaacgcctggccataccgctgcgcctgtcgctgcaatggcccggcctgccgctggacgccagcgagctgcgcaccctggagcccggcgacctgttgctgctgcctgccggtcatcgccccgacgcagcgctgctgggggttctcgaaggacgcccctgggcgcgctgccaactccactccacgcaactggaactgctcgacatgcacgacaccccctccctcgccgacggcgaggacctgcacgaactcgaccaactgccgatcccggtcagcttcgaggtcggccgccgcaccctggacctgcataccctctccaccctgcagccaggctcgctgctcgatctcgacagtgccctggacggcgaagtgcgcatcctcgccaaccagcgctgcctcggtatcggcgaactggtcaggctccaggatcggctcggggtgcgcgtaacccgcctgttcggacacgacgaagcatgatccagttgcccgacgagctcggcctgatcctcggcctggccctgctcgcgctggtcccgttcatcgcggtgatggcgacctccttcatcaagatgaccgtggtcttctcgctgctgcgcaacgccctgggcgtccagcagattccgccgaacatggcgatgtacgggctggcgatcatcctcagcctgtacgtgatggcaccggtcggcttcgccacccgcgactacctgcgcaaccacgacgtcagcctgagcgactcggcatcggtggaacgctttctcgacgagggcatggcgccctaccggaacttcctcaagcggcagatccaggagcgcgaacacaccttcttcatggaaagcacccgccaggtctggcccagcgaatacgccgagcggctcgacccggacagcctgctgatcctgctgccggccttcaccgtcagcgaactgacccgtgccttcgagatcggcttcctgatctacctgcccttcatcgccatcgacctgatcatctccaacatcctcctggcgatgggcatgatgatggtgtcgccgatgaccatttccctgccgttcaagctgctcctgttcgtcctcctcgacggctgggcgcggctgacccacggcctggtcatcagctacggaggctgaccatgagcagcgccgacatcctccacttcaccaaccagaccctgtggctggtgctggtcctgtcgctgccgccggtactggtcgcggccctgatcggcaccctggtatcgctggtccaggcgctcacccagatccaggagcagaccctcggcttcgtcgccaagctggtggccgtggtggtggtactgttcgccaccagcggctggctgggcggcgagctgtaccgtttcgccgaaatgaccctgctgaaggtgccgctggtgcgatgagcgtccaggacctgcagcaactgctgctgacctacagcctgctgctgccgcggatcatcagttgcttcgtggtcctaccggtgctggccaagcaaaccctgggcggcggcctggtgcgcaacggcgtggcctgctcgctggcgctgttcgcctacccgatcgtcgctggcagcctgccgccggccctcgacgcgctggacatcgccctgctgatcggcaaggaagtgctgctcggcctgctcatcggcttcgtcgccaccattcccttctgggccatggaagcgaccggcttcatcatcgacaaccagcgtggcgcggcactcgcctcgaccttcaaccccagcctgggcagccagaccagccccaccgggctgttgctgacgcagacgctgatcaccctgttcttctccggcggcgccttcctcgcgctggtcggctcgctgttcaggagctatgccagttggccggtgagcagtttcttcccgcagctcggcagccaatgggtggcattcttctacgcgcagttctcgcagatgctgatgctctgcgcgctgttcgccgcgccgctgctgatcgccatgttcctcgccgagttcggcctggcgctggtcagccgcttcgccccgtcgctgaacgtgttcatcctcgccatgccgatcaagagcctggtggccagcctgctgctggtgctctacctgggcatcctcatggagcacgcctacgatgccctgctgctcgccgtcgacccgctgcgcctgctgcgtcccgtgctggagacgccatgagcgccgagaagaccgagcagcccacggcgaagaagctgcgcgacgcccgccggcaaggccaggtggtgaagagcaaggaaattgtctccagcgcgttgatcctgtcgctggtggcgctgctgatgggcttttccgactactacctggagcatctcggcaagctgctcctgctgcccgccgagtacatcgacctgccgtttcgccaggcgctggagaccatcctggagaaccttctccaggagctcctctacctgctggcgccggtcctgctggtcgcggcgctggtggtggtgctcagccatgtcggccagtacggtttcctgctcagcctcgacagcgtcaagccggacctgaagaagatcaacccggtggagggcgcgaagaagatcttctcgatccggagcctggtggagttcctcaagtcgaccctgaaggtcgccctgctctccctgctggtctggctgaccttgcagggcaacctggccagcctcctgcggattcccgcctgcgggctggactgcgtggcaccggtgagcgggctgatgctcaggcaactgatgctggtctgcgcggtcggcttcctggcgattgccgtcgccgactacgccttcgaacgccaccagcactacaagcagttgcgcatgagcaaggacgaggtgaagcgcgagtacaaggagatggagggcagtccggagatcaagagcaagcgccggcaattccatcaggaactgcaatcgagcaacctgcgcgcggatgtccggcgctcctcggtgatcgtcgccaacccgacccacgtcgccatcggcatacgctatcgacgcggcgaaacgcccctgccgctggtcaccctgaagcacaccgacgccctggccctgcgggtccggcgcatcgccgaggaagaaggaatcccggtgctgcaacgaattccgctggcacgggcgctgctgcgcgacggcaatgtcgaccagtacataccggcggacctgatccaggccaccgccgaagtcctgcgctggctggaaagccagcagacggatacgccctgatcgctatcgggcagggcggccgccgcggcaccggcgacgaaagacgctgcgacctggcgccgaaaaaaaggggcccgaaggcccctttcacatgcttgctacgggtcagtccttgtccgggatcccgtgtaccacgcccgcggtattctccagcaggctcttggtcgcggtctggatgaacgactccagcttcttctgcagctcggcctggtccggcacttccttggtgatcaccgccttggcatcgccgcccagttggtaatcgtagacgcgcacgtcaccgtccttcggccgcaccaggatgcggttgccggagacgatggcgacgttctgctcgctgcccgacggcttgatcacgccgaagcccttgtcgccttccggcaggttcagcaggtcgcggccccagcactggtggacggtctcgccgccgagcaggcccatgatggtcggcacgatgtcgacctgggtaccgacggtcggcaggtgggtaccgaacttctcctggatgccgggggcgatcagcagcagcggcacgttgaagcggtgcaggtccatctcggtgagctgctcggggctgccgaagccatggtcgccgaccaccacgaaaagggtgtccttgtagtacggcgacttcttcgccttctcgaagaactggcccagcgcccagtcggaatagcgcatggcggtcaggtgctcgtcgagcgaaccgtagccggtcacgcgctccaccggcaggtccttcggcaacgcatagggcacgtggttggagaggctctgcaacagcgcatagaacggcttgccggtgctcgccagcttgtccagttcctcgttgccacgggcgaacatgtcctggtcggagacgccccaggtcggatcggagaacaccgggtcgacatagtcgttgcggccgatgaaggtggtcatgccctggttgctgaagaagccggactggttgtcccaggcgaaatcgccgttgtagacgtagacgtcctcgtactggcgggcgctgagcaactgcggcaggccggagaacttgtggccgccctccggggtttgcatcaggtattcgaagcccggcaggttggggaagcaggccatggtggcgaacatgccctggtgggtatgggtgccgttggagaagaactgggtgaacagcaggccttccttcgacagcttgtcgaaatacggcgtgatgttgcccggcgcgcccagggcgccgacatagtggccggcgaagctttccagcaggaccaccaccacgttgcggatcggcagggcattcgccgccggcggggtgaactcgcggcgcaccgcggcctcatcggcgtccaccagcttgtcgttgggggtcagcaacatctgccgggtggtctccagggcgaccttgtcgtccagggtggccttccagatgttcgcgcggtcttcggagaagcgctccttggccgccttgaccagggtcagggtgccgttcaggcccagttggttggcgaacatggattcggtggtgaaggcatcgccccagcgcagcggcgggccctggcgcagggtgccgcgggcggcgaggacgcagaccagcacgcagaggaacagcaccacgccgcgcacgtaccagggcgcggcagcgctcggccgggcgatcacgctgtcttcgcgcggcttgcgctggctcgggcgggtcgccaggtcgatggccttgaacacccggtacagcacccaggtggcgaaggcccaggccagcaggtagcggaccaccgggaagccgtaccagagcatgctcatgacggtcttcgggtcttccgacatgtactggaagaccaggctgttcaggcgctggtggaactcgcggtagaagtccagttcgagtacgccgaggaacagggtgatgctggcgaacagcgtcaaccatgtacggaacaggccgcgagcggccatcgcgcgtaccgcgaacaacgacagcaccagcggcgccacggcatagacgacgacccgcaggtcgaaacgcacgccgttgccgaacgcctcgaggaaggtgctcgccggggtcgcgccgatcagttcgcggttgtagatcagcaaggccaggcgcagcaggctgaacatgaccagcagcaccagcgcgctgagcgcggtgaacgccaggtggctgcggatggtgggctggaacagccgtgggggcgattgggtggttcggacttccgtttggtccatttttacaattcgctcttctgtcgttcgatttcgagaatgcggtcccgcccctgctcggccagcaggtagcggccgggcccgatgggcagtagggactgtgcggaacgcaggcgccgtacgatcacctgcagcggcccgtcgggcggcagcagcaaggctcgcgcgttatgcgtcgagtcctcggtgatccacaggccttcgctgtcgcacagcaaaaagctcggtgcattcagtccgttcagcaccacctcgtcctcggccccctcatgcagacgcatgacgtggccacgtttcttttccgtgtagaagacgcttccgtccgggcaggcggccaccccttcggagcgctgcaaaccctcgcgcagtaccgtcagtccgccggtctccgggtcgtagcggagaatccgcccgtccaggtcgcgatcctcggcggcgtacaggtagcggccgtcgctggcgacgccctccacctggatgccgtcgaacagcggccgggcctgctgggcatgccaccagaacaccggcgaggcgccctgctcctggctgatcgcgatgccgtcgcggaagctggccatgccgtcgggcttggacagcccgtcgagcaccgtatcgcggctgccatcggcggcgatgcggaacaccaggcccttgccgtcctgcaactcctggctcacgtagagcaggccgtccgggtcgcgggccagggcgctgacgtggggaatgtcctcgagcactacccggtaggtccagccggatacggtggctgccggggcgaaacgctgccagccgaggaaggccagggcgatgaagaggacgctaccgagcaggcaggagactactacgccgctctggcgcaatcgtttggtcagcattcgatgcactcaaggacaaaactgccatttatagccatggcaacggaaaaaagcgcgcagattttcccggatcgattgtgaaaaaaatgttagctggcagtaacaggggatgtcggagcgacgcatgaaaaagggccttgcggcccttcttggtgaagcgtcagtcgttgtcctgcttgccgatggcctgcagcacgtactgcggcagagcaaacgcgcccaggtggatatcggcgttgtagtagcgggtggcgatgccgctgtcgcggaagcgctggcgcagcgtttccagcggaaggcgacgcaggccttcgcgggtcgaaccccaggcgaaggtcatggcgccgccgatataggtcggcaccgccgcctggtagaaatgccagtcggcgaacagcccgtcggtacgtgcggcggtggtgcgcacttcctccagttgcatgaacggcgtgccgttctgggtgaccaggatgccaccctcgttcaggcagcgccggcaggcctggtagaagttctcggagaacagcacctcgccagggccgatcgggtcggtggagtcggagatgatcacgtcgaagcgttcttccgtggtagccacgaagcgcatgccgtcgtcgatcaccaggttcagccgcgggtcgtcgaaggcgccctgggagtggttgggcaggaacgccttgcacatgtcgaccacggtgccgtcgatctcgaccatggtgatccgctcgacgctcttgtgcttggccacctcgcgcagcatgccaccgtcgccgccgccgatgatcagcacgcgccgggccgcgccgtgggcgaggatcggcacgtgggtgagcatctcgtggtagatgaactcgtcggcctcggtggtctggatcactccatcgagcgccatcacccggcccatccgggcgttttcgaaaatcaccaggtgctggtgctcggtgcgcacctcatgcagcatgttgtcgatgctgaagcgctggccgtagccctggtacagagtttcctgataatcgctcatgggccgggatctccctggtaaggctgcaatctggcagcgggacttgcccgcgccgcgaagaaaggcgcgcattctacgctggcggcaatgacaggtcgaaccccgccggcggatggcgccggctgcgccggacaggtatcgtctgcccatgagccagcctacctctcccctcgtcctgcacctgccctaccagtcaccctgggaatggcgccagttccaccagcatttcgccctgcgcctgctcgccggtgtcgaaagcctgggtgacgaccactatgcccgcagcttccgggccaacggtcgcccggcctggttcgaggtgcgaccgctggcggaacgccaggtcctggcgctgagcctcagcccgtccgcccatgccctggccgccgaactcgaggcacgggtccgccggatgttcgacctggacagcgacccggccgccatcgcccggcatttcgccggggatcccctgctcggcccgctggtggccgccaatccgggactgcgcctgccggtggccttcgatcccttcgaacaggcggtgcgcgccatcgtcggccagcaggtcacggtgaaggccgcggtgaccatcaccgggcgcctgatccagcgcctcggcgagccgctggaagatctcggctacgacggcatcagccacctgttcccgacgcccgccgcgctggcgcaagccaacctcgacggcatcggcatgcccggcaagcgggtacagacgctgcaacgcttcgccgcggcgatcgcctcgggagagctgagcctggacctggcggacggccccgaggccctggtggagcgcctctgcgcgttgcccggcatcggcccctggaccgccgaatacatagccctgcgtgccatgggcgaagccgacgccttccccgccgccgacctcggcctgctgaaatccacggtctgggggccgcaaggcatcgatgcgcgcagcctgaaggcccgcgccgaggcctggcggccttggcgcgcctacgccgcgatccacctgtggcaccactacgccgcaggcggctaacgccgcggcgggaggctacagcctgacgttgccgcgcgggccggcgatggcccagatgatcaggccgagcaccggcaggacgatgatcaccaggacccagatgatcttcatcccggtttccgcagcgcttttcaggatgttgacgatggcccagatatccagggccaggatgaccaggctgatcagcccgctgagggtggaacccatggcgcgatgctcccgagcaagagtgttccctcaggatagccggcgcgttcactccacgaggatgtcggcgaagctggccaccgtcggatggccgtccaggctgccgccttcgcgggccaggccgagcgtgcgcatgcccgcgtcgcgcgcggcatccagttcctgcaccacgtcggaaaggaaaaggatttccgcggccggcaggccgatggccccggcgatccgcgcataggaggcgctttcccgcttcggcccgctggtagtgtcgaagtagccggaaaacagcgagcccaggtcgccggcctcggaacagccgaagatcagcttctgcgcctggatcgagccggaggaatagacgtacaggtccagcccacgggccttccactcgcgcagcgcctgcaccgcgtccgggtagacgtggcccttcaactgaccgtcgcggtagccctgggcccagaccatgccttgcagggccttcagcggcgtcaccttgcggtcctcggcgatccattgcaggaggatcgcgatcacccgctcgacatcggcgtccgcctcaccgctctcggcacgcaccgccgccaactgtgcggctacctcggtctctccggcgtgttcgcggacgaagtccggcaggtgccgggcggcatagggaaacagcacgtcgaaaacgaagctgaccgcgctggtggtgccttcgatgtcggtgaggatggctttgatggtcatgcggactccggatgaaaccgcccccggcaggaccgggggcgcggatggtgacggatgggacggtgcctcgctcagtcttccagcagggggaagcggctggcgatgtcgtcgccggtgaactgggcgacccagccctccgggttgttgaacaggcgcacggcgacgaaatgcgggtgctcgcccatgtcgaaccagtggcgggtgccggccggcaccgagatcaggtcgttgcgctcgcagagcacggcgtagacatgctcctcgatatgcaggacgaacaggccgcgcccggcgacgaagaagcgcacctcgtcttcgccatggcggtgctcgtcgaggaacttggcgcgcaattcggccttctgcgggtggtcgctgttcaggctgaccacgtccacggtgatgtagccgcgctcgcgcttgagccgctcgatctcgtgggcgtaggcggcgatcacctcgtcctggctggcgccggcggcgatcggcgcggcggcttcccagcgttcgaaacggacgccgacctcggccagggtcgaagcgatgtcctcggcatgggtcagcagcttcagcggctgctccggctggttctcgtgatagacggtaaggctgctcatcggctcagactcagtactttcagttcacactcgaacagaaactcgaaagcttccacctgacgcagggcatcgctcatgcgcgcgccccaagtgtacagcccgtggccgcggatcaaataccccgggcagtgcggatgcgcctccagccagggctgcacgcggctggccaggcgggcgatgtcctggtcgttgtcgaagatcggcacctcgacctggccttcgtgggtggtgaccccggcgaaggccttctgcagttcgtagtcctgcagcaccaggcggtcgccgcggaccaggcgggaaagcacggtggcattcaccgagtgggtatgcagcaccgcgccgatcgccgggttccaggcatacagctgggtgtgcaggagggtctccgccgagggtttcttgcccggttccaggctgttgccggccaggtcggtggccagcacgtcgtcgaagcccaactggcccttgtgcttgcccgagacggtgagcagcgcgcgctgttcgtccaggcgcgcggagtagttgctgctggttgccggcgaccagccgcggccgtagaggaaccggccggcgtcgatgatctgctgggtcagttgttcacggttgtcgttcatgcccgcacctcttgcaaacgggtactgatgatagcggctgccagcaaggctgccaggctggcgatggcgaaggtccaggcagggcccaggctgttccagctatagccggaatacagcgcgcccagggctccgccggtaccggccagcgcagcatacagggcctggccctggccctgctggcgcgggccgaagctacgttgcacgaaatggatggcagccgcatgaaaactgccgaaggtggcggcatgcagcgtctgggcaaagaccagcagcgccaggctgtcggccaggttgccgagaagcagccagcgcagcgacgccagcaggaagctcgcggccagcacctggcgcaggctgaaacgttgcagcaggcgtggcatggcgaggaacaacatgacctcggcaaccacccccagcgcccagagcagaccgatcagcgcccggctgtagcccagcgattccaggtgcagggtcaggaaggtgtagtacggcccatgggacagctgcatcaggcacacgcacaggtagaacgccagcacgcccggctggcgcaactgggcgaggaagccgccctcgccttcgcgcggttcgcgatgggccggctgggcattgggcacccaccagctgcacagcacgatgccgagcatgatacccagcagcgtcgccgggtagacatccaggctcaggcgctcgaacagcgcgccgagaccgaccacggtgcagatgaaaccgatcgagccccacaggcgaatccggctgtagctggcgctgcgctcgcgcaggtgggccagggtgatgacctcgaactgcggcagcacggcgtgccagaagaacgcgtgcaacgccatcaccaaggccagccaggcgtagctgtggctgacgaagatcagcgagaagcccagcgccgtgcataccgcgccgaagcgcacgatggccaggcgctggccgctgcggtcgcccagccagccccacaggttgggcgcgacgcaacgcatcagcatgggaatcgccaccagctcgccgatgcgcgggctggggaagcccaggtgatggaaatacagggcgaggaacggcgccgtggcgccgagcaggctgaaatagaagaaatagaagctggacaggcgccagtagggaaccgcgctggtcacgatccgccgttcacccgtcccgcatcgctgcctgccacagccctcacagctgcggcaggaccggcgtgtcgacgcgcacgtcggcgttctgcccacgctggcgcagcaactggtcgagcaggacgatggccatcatcgcctcggcgatcggcgtggcgcggatgccgacgcacgggtcgtgacggcccttggtgatcatgtccaccggctcgccggcggtatcgatcgagcgcccgggagtggtgatgctggaggtcggcttcagcgccaggtgggcgacgatcggctggccggaggagatcccgccgaggatgccgccggcattgttcgacaggaagccttgcggggtcagttcgtcgcggtgctcggtgccgcgctgggcgatgctggcgaagccggcgccgatctccacgcccttcaccgcgttgatgctcatcagcgcatgcgccagttcggcgtccaggcggtcgaagatcggctcgcccaggcccggcggcacgccttcggcaaccacggtgatcttcgccccgaccgaatcctggtcgcggcgcaattggtccatgtaggcctccagctccggcaccttgtccgggtcggggctgaagaaggcattctgctcgacgctgtcccagctcctgaacggaatctcgatcggcccgagctggctcatgtagccgcgcacctggatgcccaggcccgccaggtatttcttggcgatagccccggcggccacgcgcatggcggtctcgcgcgccgaggaacggccgccgccgcggtagtcgcgcacgccgtacttgtggtggtaggtgtagtcggcatgggccgggcggaacaggtccttgatcgccgagtagtccttggacttctggtcggtgttgcggatcagcaggccgatcggcgtgccggtggtcttgccctcgaacaccccggaaagaatctccacctcgtcggcttcctggcgctgggtggtgtgccggctggtgccgggcttgcgccggtcgaggtcgcgttgcaggtcccgggcggacagttccagccccggggggcacccatcgacgatggcgaccagcgccgggccgtggctttcgcctgcggtggtgacggtgaagagcttgccgtaggtgttgccggacatgcgaggctccgcgtgaggacgagagggaaagacatcggagtatacccgtcaaggacgggcctgcgaaccttccccggaggacgcgatcaaagcgctatcatcggcccatgaagacctccatgccgcgcgccctcctcgccctgttctgcctgctcgccagcctggcccacgccgctcccaacagcatcctgcaccgcccctacgacctggacaccgggcacggcgtgctgcgcggctccttgctgctgccgcgcagcgccgtgccgccgccggtggtcctgctggtcgccggctccggtcccaccgaccgcgacggcaacaaccccttcggcggcaacaaccgctacctgttgcgtctcgccgaggccctggccgaacgcggaatcgccagcgtgcgctacgacaagcgtggagtcgcccgcagcctggcggcggcgccgcgcgaggaagacctcagcgtcggcgtctatgtcgacgacgtggtcgcctggagcgagcggctggcccgcgacccgcgcttctcccggctgatcctggtcggccatagcgaaggcgcgctgatcgccagcctggcggcgcctcgcacgccggccgaggaattgatcgccatcgccggcagcggccaacccatcgaccgggtgctgcgcgagcaactgcgcggtcgcctgccgccggcgcaactgcgccaggccgactcggtgctggcttcgctgaaggccggcgagacccgcggcgatatcccgccggcgctcgccagcctgctccgccccagcgtgcagccgtacctgatctcgctgttccgcgaagacccggcccgcgcgttcggccgcctgcgcatcccgaccctgatcgtccagggccgcaatgacatccaggtcggcgtcgccgacgccgaggcgctccagcgagccaagcccgactcgcaactggtgctcatcgacggcatgaaccacatcctgcggatcgccccgagcaccggtctccagcagctttccgcctacaacgacccgaacctgccgctggcccggcaactggtcgaggcggtcagccgcttcatcctgcgcggcgcagacgcggaaaaaggccgctgagccgctacagaaatcgcttcccgcgccgacaagttctgaaagccggcccgtgaaggcggccggccagaggatgtccgatgatcgatagcgatacccaaccggccgcagaagaagccgagaagaaaccgccgcacccctgggccgaactggcgccggagcatttccgcctgctccgcctggcgccactgcccaccgaccgcgcgaccggcgcccgccccctgcgcttcgtccagctcggcagggtcgaacggcacagcgcggaccagagcctgctgcgcctgagcatccaggtgccaggcctgatgctgcgcaaggagcagaacctgctggaggtctgggccgatcatcgcaacaaggaagtgcgtttcggttcggacgccgggctcagcctggaacccttgaaccgcgggctgggccgtttcctgctggcccaggcgatcgcctgggcgcaacgacgctgggcccactacaaggtggaaggcggcgcactggcgctgaaggatggcctgaccgaagacgcacgcctgcgccgcgaccatttcatccgcgcccagggcttcgacgtcagctatgaggaccagcggttgctcaaggcccgctacagcgccggccgggtcagtgagctgcacagcgattggcacaaggacaaggtgcagatcgtgccgctgctggacgccgcggcgatgctggaacaggccgagcagaccctgcaggcccaggatgctgagatccgccaactggaacagcgcatcaaccactaccgccgcgacgacaccagcctgcgcttcaccatcgcctgcctgaccgccttcgcggtgttccaggccggcctgctgatctggatcgccactcactgaaccggcggcaccagccgcctccgatcacttttccaagcgcgaacggaacagttcccggtgctcgcggcactgcgcggcggacagcatgaacaccccgtggccgccgtgctcgaactccagccaggtgaagtccacttccggatacagcgcctgcacatggacctcgctgttgcccacctcgacgatcagcaggcctttctcgctgaggtggtcggccgcctcggcgagcatccgtcgcaccaggtccaggccgtcgtcgccgcaggccaggccgagttcaggctcatgatggaactccgccggcatgtcggcgaaatcctcggcatccacgtagggcggattggacacgatcaggtcgaagcgctggccgggaagcccggcgaaaccgtcgccctggacggtgtagacccgctcgccgaggtcgtggcgctcgatattgacgttggccacctccagcgcatcgaaggacaggtcggcgagcaccacctccgcctgctcgaacgcataggcgcaggcgatgccgatgcagccggaaccggtgcagaggtcgaggattcgcgccggctcggccggcagccagggcgcgaagcgctgttcgataagttcggcgataggcgagcgcggcaccagcacgcgttcgtcgacgctgaatggaatcccgcagaaccaggcctcgcccagcaggtaggccgccggaatccgttcctcgatgcgccgccggaggatttccgccaactcggcgcgttcatcgtcttccaggcgacaatccaggtagctgtcagaaatttcccagggaaggtgcagggagcccagaaccaggtggcgcgcctcgtcccaggcattgtcggtgccgtgaccgaagaacaggccggcggcgtggaaacggctgacagcccagcggatgtagtcgcgcagggtgagcagacgggactcggacatgacggaattgctcctcgcaacgcacaaaagggcgacattctagccgatcgcgccggagctggcctccagcgcgggaagtccataccactttagtgcgcatgcggcaaaggttcacaggctcgccgataggggccagaatgaaaggcatgtgccttctcaggagtagtgacatgcctcatccgctcacccttttgcagatcagcggacgcggctacccgccagccccccttcggcagagcaccttgctgatcatcgatgcccaggaagagtaccgcagcggcgccctgcgcctgccaggcctcgacgccgccgccgcggagatcggcgtgctggtgcaggcggcccgcgccagcggtacgcccatcgtgcatgtacgccacctgggtatccagggcggcctgttcgatccgcaagggccgcgcggccagttcctcccggaactgcaaccggaagccggggaaaaagtcgtggagaaacgcctgcccaatgccttctccggcaccgagctgcacgacctgctgcagaaccacggccgtctcgacctgatcgtctgcggcttcatgacccattccagcgtcagcaccaccgtgcgcgcggccaaggactacggctaccgctgcaccctcgccgatagcgcctgcgccacccgcgacatacccaccctgaacggcggggtcctgagcgccgcggacctgcaacgcgccgagatcgccgccctcggcgacaacttcgcggcgatcgtcgcccaggcccgggaactgctctgaccgcccatccagccgccctcccgtcccgccctgcggaggactagtctgcctgcagggccatggctcgcggcgagaagacgagtggcgcacggtttgcccacggctcccgggaatccgggaacccggccggaaggttccggtcctagccccgatgacacacgaggaagtcgggatgaagttgtccgatagtttcgatgcgcgccggctgcgcccgcgccggccgagagtctggcgctggcgcctggcggcggcgttcgcggccctggtggcgagcctgggcgtgctgctgtcgctggccggcacctcggccttgatcggccgccagccggctgtcggcatgctgcatatcgaacccgccgctggcggcgtcttgctggcccttggcctgctgtcgctctgcctcggcgtgttgttctggcgtttcagccgccgccgcagccgccgcaacagcgacctgagcctgtcgccgaacctgatgaaaaagcgcgactgagcgggctgccggcgtccggccgatccggtaaactgcgccgcttcgcggaggctcccatgcaagacgacgacttttccctgttcaagagcgagatgcgcggcgtcaagcgcatctcggtcgatcgagccgataccggcaaacctcgcaacgaccgccagcaactcaagcaacgccagctcaatgccagcgtgcgcaacgacgaaatccgcgtcgatggcctgtccgaccagttcgtcatcgacgtcggccccgaggacgagctgtcctgggcccgcgacggcgtccaggaaagccagttgcgcaagctcaagcagggcctggtgcccttcgacggtagcctcgacctgcacggcatgagcgtggagaaggcccggcagacgctatgggacttccttgccgaggccacccgcctggaaatccgctgcgtgcgcgtgacccatggcaaggccgcgcgcaaggacggacgcagcccgctggtgaaaagccacgtcaatacctggttgcgccagcacccgcaggtgctcggtttcacctcctgcctgccacgccacggcggcaccggctcggtctacgtgatgctgcgcaggaccatgctcgaaggccgcgacgagtagccggcaagcgccgagtcttgccagcggcccggcgacgtcctaccctccgcgctggtaatcgtctgactggaacgcccatgtccctggaacaacactactcctcgatcctcacccagctcggcgaggacgttaaccgcgaaggtctgctggacacgcccaagcgtgccgccaaggccatgaagtacctgtgccgcggctaccaacagagcctggaagaagtcgtcaacggtgccctgttcagctccgacaacagcgaaatggtattggtcaaggacatcgagctgtactcgctctgcgagcaccacctgctgcccttcatcggcaaggcccacgtggcctatatcccgaacggcaaggtgctcggcctgtcgaaggtcgcgcggatcgtcgacatgtacgcccgccgcctgcagatccaggagaacatgagccggcagatcgccgaggcggtccagcaggtcaccggcgccctcggcgtcgcggtggtgatccaggcccagcacatgtgcatgatgatgcgcggcgtggaaaagcagaactcgtccatggtcacttcggtgatgctcggcgaattccgcgacaacgccgccacccgcagcgaattcctcagcctgatccgctgaggccaggtccgctggcgaaagaaccggccccactgggccggttttgcgtttccttccccggcgatcagccgaagaagcgcttcatcgagcgcgacaaccaaccgccctcgctcttgtccttgaccagttcggacatgctgtggcgtaccgcatccacatatccggcgtcgtcgttgcggatgtggttgaacagccagcgcgagagcaagcccttgagttcgtcgccgacatcctcgccggcctggaagcgcacccggtattcggagacccggcggatgaacagctcgtggatcttcttgtgcgcccgggaaaactggtagccggcatcctccatcagggtttcctcgaaggcgaagtgcgacagcgtgtagtccaccagctcctcgatcacctcggcgatcgccgcgtgttccttgccttgctgggcgtcgtgcaggtgattgatcatctcgacgatgcgtttgtgttgattgtcgatgacctgaataccggtattcaggtcatcctgccagaccagatgcgccatgatgacttcccccaagcgaacagcgaacggcctttccgaacggcctggggccagggtatttttgtgacgcagtacgggtattgacgccggtcaagcgggacaagatgttaatgaatttcgcatgaattcattcgcccccctcgcggcggcatgcccgctcgatccgctcggtttcgcgcggctgaacatccgccatcgtcgccggaaagcggcgtcaccagtggtcccgacaggacaggaaggaaatgaacctgatcgcgcacgtggaaataccggtgtccgacctggggagggcgatgcgtttctacgcctcggtgttcggagtggcgttcggcgaggtagccaccctgcacggaagcagaatggcgcatttccccttcgaggaaggccgtgacggtgccagcggcgcactcgccgagggcgacgtctacgtgcctacgctacatggggcgatcatctacctgaatgtcgcggacctggatgccgtcattgcccgggccctcggcgaaggcagcgaaatcctcttcccgaagacgccgcttggcgacggcgtgttcatcgccgagatcagggacagcgaaggcaatcgtatcgccctgcggagcgcttgcggagagcggccgtagaggtcctgcaaaccgagcgccgccggctcaacgggcaagaacgccggccagccaggaacgccgcgcgcccagcgcttcctgcaattcgcggacgccgatgcagcgccgttcggggtcgaggctcagggcggtacgcagcgccggccagcagcgccgaggcaggtgtccgggcgcgcgcagctggcgctccagcccctgctcccgggcctggttcgagggcaggcggcggaacggatggcgaccgtcggccagttcgtagaggacgcaggccagcgcatacaggtcggccgccggcgacaatggcgcgccctcgagcagttcgggagcggcgtagcccggagtccaggcgtcgatgcggccccggctgagctgcggcaggccatccaggatgcctgcctgcgcctggccgaggccgaagtcgaagagccgcacgccctcttcgccgagcatcacgttgctcggcttcaggtcgccatgcagtactccttgttcgtggacgtaggccagaacatccagcaacggccgggcgatcgcgctcagctcggaccagggcaggccttcgggacgctcgcagagcaggcggtcgagcggcaggccaggcatgagttccatgacgatgtaggcgcgctggcatgcggtgtcgacgtcgaaggtgaacagacgcacgacgttcggatggcgcaagcgccgggtcagggcgaactcgctatagagcaaggcgctggcgtcgggtgactcggcgaccgactcgttgagcagcttcagcgctaccagcggcgccgggtcgccgaactgctcatggagcaggtcccgggcacggtagaccgtccccatgccgccggcgccgagcatccgctccagacggtagcgcccggaaagaacgtccggcagcggaccgggcaacaccgccggcaggtccggcgccgaggcggtcggggcggcgaaggcgaaataggtcaggttcgcgccgccctcctcctccggcagcagctccagcgacgacagcggttcgttcattggcggatcaccacggccgtcaggttgtcccgtgcggcgccgctcagggcaccgtcgaacagccgctccaccgccacctgcggcgatgccaggctcaacgcgcgacccagcgcatcggcgctcagctcttcgtagagcccgtcgctgcagagcaggaagacatccccgggatgcacctccagttccaacacgtccagcaccagttgttcgctggcgccgacggcacgggtcagcgcgcgcgccgagggataggcgcgggcctgctcgatatccatccgccgttcgtcgaccagtcgctgcaacagcgagtggtcgcgggacagctggtacagccgctggccgcgccacaggtagcagcggctgtcgccgacccacacgcaggccgcccgcgacccctccacgaccagcgccaccaccgtactgccgatgatcctgtcgccgcgttcggcgctgagggtgagttcctcgcccaggcgccggttgagccagtgcaggcactggcgcatcgcgttcaggcgctcgtcgaatcccgcccgggccggcagttccgccaggctggtgacgatcatccggctggccaggtcgccggcctggtgcccgcccatgccatcggcgaccgcccagagcccgcgatccgggcagtccaggaaggcatcctcgttgcgcgcgcggaccttgccgcgatccgtgcgcgccgcgctgcgccagggctcggtgcgttgcatcagagctgcaccggcatgcggaagctgcgcaggaccgcgagatcgaacggattcggcgtgcgctgggcgagcagcaggtagttggcgcgcaggccgcccaggtcggccttgagcaccatcacgtcacgcccgctgaggtactcggtctgcatcaggtcgaacagcctgaacagcgaccagggcccggtattgcgttcgattcccaccggtcgtccggccatcttctccagcaccaggctggtgcggccgccgtcggcgtcgctgggccacttgaacgacatcggcacgatcgggccgtggcggtactccatggactgaccgtcgaaacggaactcggcgcggctgacgccaggatcgagggtatagggctccaggcggaagcgcacctgtggctcggccgggttctcggcgaagaagctctggcggatcacctgggccgtgcccatctggtccagatagaccttggacatcggcaggctgtaaccgtccacgctgcgcaggcggtaactgcccgggtcgccgctgacgaagggccgcatgtaggtttcgaagaagcgttcggcgacgccctgcgccttgaagaactcgcggaaatcgctgaccgcgacatcgctggcgctgtgcgcgttgaacgggtagcgcttgttgatcgccttgctgtagaaaccgtacagctcgctctggtagcgctggttgaggtacaggtaggtatcgccgaggaccagccgccaggcgtcttcggccagcacgctgaaccatccgccgagcggtcgcggcagtcgcgcggaggcgttgcgcaggttgctcagggcatcgcgctggccgcccatgcggctcttcgccatgtcgaaagccgcctgctccggctggctggcgcgcgccagtccggcgagttgcaactgcaactcgttgagcgcctgcaacagcggggtgaggtcggccgccgggccgttgttatcgtcgagcaggcgatgcaggggctcgaagcggcgttgcagggacttcttcgcggtatccggcaggttcttcgccaacgcgtccctggccttgccggccgccgcggcggccgccttgcccagcttgccgcccttttccgcggccttgtcgctggcctctgccagcgcctcggcgctctccgccaggaccgggaaacgggtgttctcacggacctccagcaacaactggaggatcggcgagttggcggcgagcagcccggaaacctggtcggcgccctcgccggcatcgttgaacggcagcaggcccaggcgtccgaccgcctcgctccagaagttcgcgtagtcgcggaaatacagctgctcgagttcgaccatcaggcgccgcaggtccatgtcgctgatcccgctgccctcgcccaggacccagttgtcgcgaaggatgtcgttgaccaggctggcgccctggaccacgaagtattgctggtagccctgctgggtgtagaaccccgggatcacgtagtcggtgccgacgaacagaccggcctgcggccccaggtgctggccgaagcgatactcgggcaggcttcgcgcctgttcgcgcagcacccggtagaccacgttggccagggactcgctgcgcagcacctggcgtgcctgggccaccagggtctcgttcagcggatagctgaacggttgctcgagcagacgggcgaaatgcgtgttcaggccattctgcacggtgccgttgccggcatagcgctgcgaccagtcggtagccacccagtccttgagccatccgttctcgcggcgctcgcgcagattcagcatcaggtaggcccgcaggctgttgagcaggcgttcgcgattctgcatgttgccgcggatctgcgcttcgagcatccgcgccacgcgcggcagcaattgcgtctccagctcgcggcgataggcagcggccagcggcgggttgacctcgttgccctggtacagcccggcgcgctcgtgcagcgagacttcccctttgggcggaaacacggtggtcgccgcatagctgctatccagcgtcttcagcgccgccatggcgtcgtcgcgctcgccaagcgcctggcgctgctgggcccattgctgcgccagctcgcggacccgctccaggcgctcgtggttggccgagaaaccgccagcccagagcaggccgaatagcagaaggagcgccagcgaaccgacgtacagggcgcgctggccccagtggatgcgcgtgcgttcgcggcgatcgagacctgccaggttggcctcggggaagatcacctggctcagcaggtgatggatgaagcgcgagcgcccgttgcgcagggtcggcagcaggccgctggcgatccccaggttggcgccgatgccggcggtgtcctcatccagctgctgggccaggtgcggcgcgctggtcaggtagaagccgcgcaggcggctggcgcgttggtaacgattgccggtgaaggcgagttcgacgaacaggcacaaccgctcgccgatctggccaagctggtgcgggaagtcgaggatgcgaccgcgacgcagggtatcgcgctcctggtggatgcgcatgatcacctggctgttcaggcgtcgcaggaggtcctcgaacgcctggcgcaggaccgtcacatcggtgccgttctgctccttgccgaagctggtgcccagaacctggtcgctctcctcgcggctcaactggtcgaagaactcgtcgaagccgagcaactggtcggccttgctcagcaccaggtagaccggcagatcgaggtgcaggttctgctggatttcctgcaggcgcgcgcgcacctggcgagccagcgtatccagcgccatctcgtcgtcgctgagcaacgtttccaccggaatcgacaccatcacgccattcagcggccgtgcgcggcggcgcttgcgcaacaggccgagcagggtcgcccaggcgcccccgtcgacctcgccgtcggcttgggtcaggtagcgcccggcggtgtcgatcaggacgccgtggtcggcgaagtaccagtcgcagtagcgcgtgccggcggtgtcgcgggtcagcttgcggtcgatccggttgatcgggaattccagtccggaaaagtccagcaggctggtcttgccgcttccctgcgggccgatcagcaggtaccagggcagctcgttgcgccagcgctcgctgcggccgcggtacaggctggaggtcttcagggtgcgcaaggcgtccttgaagcggctgcgcaattccttctgttcgtcttcgatcagaccgtcgcggcgcaggcgctcctggccctcgtcgctgtcctcgacggccttgcgccgcactccggcgcgccaactgacgaagaccatcgccagcccccagaccaggaacatcaggctgatgctcagcaaccgcgaggtcgggctttcccagaacttgtagtcggcgaccgccagcagcggcccgacgaaccacaccagcaatgccgccaggagtaccagcaacagcgtccagacccacgtcttgcgcaggaaggcgccgactttcttgaagaagtttttcatttcgcgtccctgtgtttacgaaccgggctgtcctgccgccgcatcgagcgactggtaaggctgcagcaccgtgtcgcgttgttcgccgagaacccaggcgaatcccgaatacatcaccaccaggcagaccagggtgaacagcgccaccatccaccagggcacgatccgcaccaggccgcgacgctggtcgctgagcccctgccagtgcggcgacagttcgcgcggcacgtcgccgcgcaactggcggatctgccggtagagcgcatcggaaataccgtccaggtcgagcacgccgcgagccatcacccggtacttgccctcgaagccgagggccaggcagaggtacatcagctccagcatcggcaggtgcttgaccgggttcttcgacagccggtcgagcaactggaagaacttctcgccgccgaaggtctcgttatggaagctgctcagcaggctgatcttcgaccattcgctttcgttgccccacggggtggtcaccaccgcctcgtcgaccaccgtgcacagcacgtagcgcgccgccatgacctggctgttttccacgccatcctgcacggcgcggaattcgaagagcttcatggcggaggtcaaccgctccttgagcgccgcaaggttctccagcacggtgctgtgcttgagccggaccacttccgaaagcagttcggaagccgccgccaccagcgggttcaggctgacgttgaaggcctcgcccggacgcaggcgcgccgcgtagatcatccgctcctcgagctgctcgaagcgcggcggttcggcgaaatcggtcagcggcccctgggccggtacctgtccctggtgatcgaggaggacggtcttctcgtcctcgtggtattccctttccttgatcatgttcagttcctgatggcccagaatttcagttcaagctcggagaactcgccggatacgtggaacgcgaaaccaccggagcgctccagctgggccatgtcctcggcgttgggttcgagaatgaaataggtcttgttggagtggaacgggatctgccgcggcgccaccggcagcggcttgacccggatccccggcaggtgcaggttgaccagttggcgaatgtgctcgaccgcacccaccttgagatgcgcgggcagccgctggcgcagttcctccgactcgcaattggcactggcggcgagcacgaacgaggcgctgccgagcaacttgtggtcgtgcaggggcgagaccaggatgccgtactggcgggcctggagaggcagttcgatggcatgctgctcgagcaccatcgacaggacctggcggatcgcctccatcagcctgcggaagctggcgccctggtcgctgtgctggtaacggctgtccaggcgcggacgtttgctctcgctgccgaaggtggcgaggtcgccgagcatggtcagcagcacccggtacaactgctccggatgcacctgctccaatcccaggtagtggcgcagcagcaactcggtgcgattgatcagttgcagcatcatgaaatcgccgacctccgcgccgccgaccttgccattggaccggatacgctcggcgatggtgtcgccgcgatggccgagcatgctgatcacttccttcaggcaggacagcaggtaggcggatgcgtgggcgtggaggtagctcggcacgaagtcgggatcgaggctgatcaccccgtccggcgtggtatccagcaccaccgccaccttcagtttgacgtaggcctggtcgctctgctgctcgccgagcagcaggcgaaaatccggccgcgcgcagctgacctgtaccatggaatcctcgccggcgttggagtccgccacctccaggtcgtaggcggtatagcgcgccaggacctcggcctgctccggccggcgcgcctcgatgtggttgccggtgaccagcggcagggccaagtagatcggcacgttcgaggtattgggcggcacgtcgagggcgagcggctcggtgttgccgccgagttcgaacagactgccgtcgggcagtacgccggaggcctggctgatcaccagcttgcccatgttgaggaactggcggtccagctccagggcgaggaagccccagttgtagctgcccagcaactgggtccgggccttcatctggttgtcgtagtagcggtcgttgtgttgcaggtgctgcgggcgcagcagcatgccttcctgccagacgatcttgtgcacgttcatcgcgcgtcacccgccttgccgagcaattcgccggcattcaggatgcccttctggcccagcttcagctctacccgggtcagctctttcgccgtgaccggcaccacgtagcgccagcttgcctcgccgagatcgcggtaggcggcgagcacgcccacgtagcggctcccctcctccacgctgagtttgagttcgacccgctcgccgggccgcagctccagctcctcgctggtcaccaggtcggggtccagggtctccttgggacgttcgtagaggctgaagaagtcggcgttctcgaacgccaccgggtgtttcagctcgaacagccgcactaccaccggcgacggccggccattgaggtcgggattgacccgctcgccggcgctcagggcgaggtcgagcttggtcagtctggaatacggcgacagcgtggaacagccggccagcagcgccaggacggcgagcatggccagcgccctggctggcgggatcgggcgacgagacatggcgatcatccttggtgctcggtgtagagggtggaaatcaggcgaacctgctcttcgtaggcctgggcgaaatcacgcgccaacagacgctcgctccaatcgtcgtcctggcatagcgactggtggtagcgaccataggcacgccagcggctgcccgaggtggccagcaacggccggcgaccgtcgcgctcgaaacgcagggccagctgctgcggcgagaaatgctcgagggtcgcgcgcaccgccgcccggctggcgccgagcagcgccacctggtgcgcctggaggtcgcggaaactgcgtgcgacggcctgttcgccactcaactggccaggcttgccatcccgtagcagatgacccagcgcctcgccggcatcggcgctgaagcgcaagggattcttgccggtatcgcgcaatgtgctcagcgacaggcgcagttcgttcttcagttcgctgcgggtccgcaggctctgctgcaagccgccgatgcactgccgcagcaaaccggcggcgtcgatcgccagcgcttcgcgcgcagcgccgtcgaggccttcgaggtccactccgagcgcctggccgaaacgctgccagaaggcttcgtcgcgttccggaggcggactttccacgggttcctgcggagccgccggggcgggcaccagctccggtacgaccaggctttccatgtcgatccgcgcgtagtccgcacgcgccccggcctcatgactgggctgggcgatcgcgctcaggtcgtcgagttcgtaggcatcggcaccgtcctggtcgagcgcctgcaacggatcgagggccaggaaggcatcgtccggaatgatgctgcccgccggctgcggccgcccgacgtccatggcgagctcgtcgggctcgcgcagcaaccgcgcgcggatctcgaagtcgccgaacaggaagacgctgtcctgctcgatgcgctgcggctcgccatgcggcaggcggctgccgttgccggcgcggatgccgttgctgctggtgtcggtcaggtagaacgcgccgttgcgatagctgacccgcgcatgctgcttggacaggtgccgcttgcgatcgggaatcgcccaatcgcactcaccgccgcggccgatgaggccgccgttcctgccgaaggtcttgctgcatagctccgtcggtacgaattgcttggcgctgagcatttccaataccagttccatgagatcgctccttgcggtcacttgccgcgattgaccgcctgcggatcgccaagcgggcgatagtcgccgtcgttgaatttgtagttgccgctgcaaccggcgaggccgcagaggacggccagggccagaagcacggcgggccagtgacgaacaggcatcagggagtctccatggaagggccgcggacgccgcgctccaggcgcgcgcccggctgggctggttggaaggaaatctcgatcatgggcttcaggtccggggatcgccgaaatgaatgttcaggcgtcccatgcgatagatcagggttcgtcgcggcagacccagttcgcgcgcggcgagggtctggttgccagcgttcctgcgcaggcaggcgagcagcaggtcccgttcgatctgctccagatgctcgcgcagcttgagcggcgcctccgcttccgggggcgcgcgcagggaaaagtgttcggccagcagcatctcgccttcgcagagcagtaccgcgcattccaccaatcccttcagctcccgaacgttgccgggaaagccatagccgtcgagcagttccagcgcttccgcggaccagcccagcggcgcgcggcgcaggaacacgcaggcgcgctcggcgaaatgccgggccagttcgagggcgtcgccctcgcgctggcgcaacggcggcaactcgatgggaaactgcgccagccggtagtagaggtcttcgcggaacttgccatcgcgtaccagcagggcgaggtcacggtgggtagcggcgatgatgcgtacatcgaccttgtgcgtatcgttgccgccgagcgggcgaatctcgccttcctgcaacacgcgcaacagcttggcctggagcgagaggggcatgtcgccgatttcgtcgagcagcagggttccgccatccgcggcatcgaacaacccgggacgatcgcgctcggcaccggtaaaggcgcccttgcggtagccgaacagctcgctttccagcaggttttccggaaacgccgcgcagttctgcaccacgaacgcctgtgcacgccgcgggccgtactcgtggatcgcccgtgcgaccacctccttgccggtgccggtctcgccctgcagcaacacggtataggggttgtgcaggaccttgctgatcaggcggcaggtctcacgcatcgccgcgctcctgccgatcagcccgtagccgctgaccaccggtgcgctggacggtccctgcggctcgccggagggttgcgagaggcgttgcagcagatgcagctgggccagcacgaacgagcccagctggcccagtggatgggcgaatccctgcaggtccaatggccgccgggtagcgcagaccaccatgccctcgaccgttttctccgggctcaccagcggaacgcagagcagggacagccagggctgctcccctgccggcaggaagccggtctcgtgcagccgcgacggcaggtcgacgagactgaccacgcggttctggcacagggcgaactgcagcaactgctcgccggtgtagtccgccggcaggctcgacggctccagcgcctgcaacaggccgtcccggcattcggcgttgagggtgagcgcggtatgggtctggtcgagcagatacaactggctcagctcgcagccgctgagttcgccgactgcgcgtgcgaaaccgcccagcagggccgtgatgtcggtttcccgcgacagcgcgccgaactgagcgagcagggcttcggcgaaggccaggggttgcggtacgcggctgaacatcgcacccacctcaggcgaactcgcagagcacacgcccgtgctcgcccagcgtcgcatggacccgctcgagacgctcgtcgcgcgccatcgcttccagcaaacggtcggccaccagcggcagcaggtgcgtgtccagcaggtggtcgatcaaccgtgcgccgctgtcgctctgggtgcaacgctcggccaggtggcccaccagcgcctggctgtagtcgaaagccagttgacggcgcgccaggcgctcgccgaggcgttgcagcttgatctcgatcagctcgcgcagtaccgggccgcccaccgggtagtaaggtaccacgcgcatgcgcgccagcagcgccggcttgaaatgccggctgagcgccggccggatggtttcctccaggagttcggcggaaggccgcgcgccgtcctggcaaagcgcggcgatgtgctcgctggcgaggttggaggtcatcaggatcaaggtattgcggaaatcgatctcgcgcccttcgccatcgttggccacgcccttgtcgaagatctggtagaacaggttgagcacgtccggatcggccttctccacctcgtccagcaatatcaccgaatagggcttctggcgtaccgcctcggtgagcatgccaccctcgccatagccgacataaccgggcggcgcgccgatcaggcgcgagacggtgtgcttctcctggaactcggacatgttgatggtggtgatgaaacgctcgccgccatacagcaggtcggccagcgccagcgcggtctcggtcttgcccaccccgctcgggcccaccagcaggaacacgccgaccggcgcatcgggcttgttcagcccggccgcggtggcgcgcatcgcgcggtccagggcgctgaccgcctgttcctggccacggatccgcgtccgcaggtcgtcggcgaaccccatcaccttggcgttgtgttcccgcgccagttgttccaccggtacgccggtccaggcgccgatcacctcggcaaccaggcgcgggcagacctcgaagctgaccagccgcccctgggcctgggcatcggcgagcgcctggcgggtttcgtgaagggccttttccagggcttcgacaccgccatgctcgtcggccgggaaagtctccgcgtccgcctcgccgccctgctcttcccggttcgcctcgcgggccctggccaattgctggcgcagggcgagcaggcgctcggcgagttcgcgctggcggctccactggtcctcctgtacgtgccgctcgctttccgcctgggccaggcgctcctccagcgcctgcagggcatcgtggtcgatcggcaggcctgcctcggcatcgcggcgcagggcctggcgctggcgctcgccttcggccagctcgccgcgcaggcgctcgaggctctccggcgccgccgccaggctgatgcgcacccgcgcacaggcggtgtcgaggacgtcgacggccttgtccggcaactggcgacccgccaggtagcgggcggacagttcggcggcggccaccaccgcgtcgtcgcgcaggtagataccgtggctttcctcgtaaacccgggccaggccacgcaggatcgtcaccgcctcggcaacgctcggctcatgcaactgcacgggctggaagcgccgggccagcgccgggtccttctcgaaatacttcttgtattcggcccaggtcgtcgccgcgatggtgcgcaactcgccacgtgccagggccggctttagcaggttggcggcatccgagccgccggcctgaccgcccgcgccgataagcgtatgggcctcgtcgatgaacaggatggtcggcctgagcgctgccttcacttcgtcgatgacgcctttcaagcgccgctcgaactcgcccttcacgctggcaccggcctgcaacaggcccatgtcgagggacaacagctcgacgtccctcagcgccggcggcacttcccctgcggcgatccgcgaggccaggccttcgacgatggcggtcttgccgacgccggcctcgccgaccacgatggggttgtttttccgccgacgggccaggatgtcgaccatctggcgaatagccccgtcgcgacagagcaccggatcgagcttgccgtcgcgcgcctgctgggtaaggttgtgggtgaaacgctgcaacagggactcgccgccgcccggcttgccgctgggcgcgccctccagcggctgcgagagcgcgaaatccttcaaccgctcgatgtcgagccgcgccagcagcggctggtagcggctgccggcatagcgcaacgggttgcgtagcagggccaggatcaatgccgcctggtcgatctggctacggcccagttcgaggttggccagcaacagcgcatcctgcagccactgcaccagctcgggcgcgaacaccggattgcgcgaggcgctgtgctcgccccgcgcttgcaacgcggcgttgagttcgccggcgtccaccgcggcatcctgcagggcgcgcgccagcagtccctggggacgctccagcaggcccagcaacaggtcctccaccagtaccttgctgccaccacgggctacgcagcgctcggccgagccttcgaggtcgcgccgggtgtcggcatccagcgcctgaatcagttgttgcaggtctacgttgatcatgctcatccatccttaatgaatcttgctgcccagcgtcaccacgccatccgcgcgctcccggcccagccagctggtccagccaaggcggcaggcgttctgcgcgccgatgcggaactcacggatttcctcgtggcgcaagaccagccggatgtcgtagtcgagcgggtcgcgcagggtgaagcgaaccagcgcgcaaagcggctggtagccgggaccgatcggcaggaactcgtggaagcgctgccagtcgagctggcggatatgaatgcggaacttgccgctgcggtcgcggacccgttcgcccagcaccgcgtcttcgccaagctggctgttgaacaggccgagccggttgcgctgctcttcgaggatcgcgacgcgccgttcgatacactgctcggcgaccagttcggcatgcttgaagtagtagcgcagcaccgactcgatcaaggccgccgagtgcgcccgcaggctgagcaggcccaggtagggcagcaggcgtttccagttcagttccctggccttgcggatctcttccccgcccaatccgacgagggcgaacaactgagcggagaacgcatcgctcgcgccgctctggaagctcacccggtagcggtacttgcgccagatcggcaacagcagccgatgcaggcggtgatggaagagatcgaggaagttccgcgtaggattgccctcctcgctgtcgcccagagcctgctcgctgtagaacgccggcaacggcgaactggcaccgaacaagccgatcaggttgaaacgcagccgcgcccgcagcatgccgcgctcttcgaagaactccacccgatcgacatcgctgcccgggaaaccgaggctaggattggcctggaattccaactgatcgtagagcgcctcgtctcccaggctgggatattcctcgcgcaggcgatccatgaccagcaggaccgcctggaacagcgagtactcgcgaatgccccgggccagcgcgcttacagcaggggctgcaaacccatgcgcggtttccattggtacacgtctccctgtgtgctcctcacccgcaactcgtggtaggagttgatgctggcgtaaagcgcgaaaaattcgttcagaaccgaagcgaacacgaacaggtcgccctcgccgatgtagccttccggatcgatcgtcagctcggtacgcaagccgcgcagcggcaggccccgatgcaggcggtcgacatgctcgtggcggaccgccttgagcccgcccagcaggcgcttgctgaccttcgccgcatgctggtcgtagtagcgcggcaggtcgtaggtttcgaggatcaccttgagcgcgtcgacgttggccagcgacaggtagttgagcgacatgttgctgatcagtttccagaggaaatcgcggttcagcggcggcgcgtagctcggcgtcgccggggtgatattgcggaaaccgaggaactccggcgtgccttcgcaggcgacgcagatatcgcccaggcgcagccgttggggcaggttctggttggtgcaggtcagttccaccgacagcgtctcgatctgctcgggatggcggatgccgaagctcaggtaggtgtccaggccatcgtgcagcaacgaggtccgttgccggacgctgtagtggggccgtgcttccgggacgtcgaagctgggatcgtgctcgaaggactcgaacggcacataggcctggtagccgagcccgcccggccgccagccagtgacgccctctaccgagaacaccccgcagtcctccagactgtattcggccggcatcagcaggtactcgtcctgcttgccgtcgaggcggatcggcagcgcatcgtggcggaacaggttggccaccggcgtacagtacagcttgacgttctccagtgtcgggtgcaggcgctggatgccgctcttgcggatatcgaagcgcaactcgaggccgcggacctgcttgagggtttcctcgggcagcgcgccgagcaggtcaaggccatccacgtcgacgaacaggaacttgtcctggaacgcgaagtactcctgcaggtagcgatagccacggaaggtattcagcggatagggaatcaacgcctcgtcttcggcgaaacccaccggctgcacccgctcgcccgtcaggcggaacgacatcggcttgccggccacgccatccagcggccgcccatgggcgtccagcggaatcagttggatgctctccaggttgcgcagcaggcaaagatagagcatctggctgatgtagcgctcgccggccaggtgcaggcgcagccgactcaggcccagctcgccgagatgcccgtcgcagttcatcgccaggcgcaggccgagcagcgcaccctcgccggtcaccgaatagttgagcgcctccagcaccagcggcaggacctcggtggcgtagcaggtacggaagcgacaggcgacctcgcccaccggccggctctcgaccggcgtatcgcgctccacgcgcagcgccccgcccgggcgggtcagggggtcgaactggagaatgctgaaagccggcagcgggcgcatatagttcggccacagcaggtgcatcatcgagtgactgagttccggcaactcgtcgtccagcttctgccgcaaccgcccggtcaggaaggcaaagccctcgagcaggcgctcgacatccggatcgcgtccgacctgcccgagagacggggccagggccgggctacgctcggcgaaacggcgccccagctggcgcagtgcggtgagttcgctctggtagtaatgattgaaggacacggcttacctgctggatatcgtttcactgatggcagtcgtctgaccgctgccgccaaaaccgcaatgacatttctggcctgaagatcggaaacccacggtgtccgttgtctttccgtaatcgacccgattcgcgcccatctcagaagacctcatggacgaaccaggcatcgaagcggtacagcgccaggccgaggcgtcaccctggcgggccgccgcgaggccgtcgaagaacacgtcggcggaaccgacgacgatgggattgctgccgtgcccggggagcggacaagcggtgggatcggaaacgcgggctgcgggtttgccggacatcgaaacctccttagctgaccttcacctggccgctgccatccaggcatgcggaaaaactcacctggcgcttgaaaccttccacctccagcaacccttcgatgctgaaggccaggcggagctggtcgttgtcgcgtggcagggaaacgacacgcacgtcgctcaagcgcggttcgtaagcctcgatgaaaccttcgatggccgagcgggcctggctcagggagtcgtgcaggctcaggcgcatgtcgttgagatcgggcaacccgtagtcggacagcgtctgcacgctgcccgcccgggtgctgagcatcttgcccagatgggcagccaccgacgccatggcggaaacctcgcggctccagccgacgcgcttatccgcgtcgccgttcaggcgctcgaacaggctgccgtatccggtcatggaaagctccgcttactctttgtccagcttgccgaccagcgacagggtgaagtccgcccccatgtacttgaagtgggggcgcacgttcaggctgacgcggtaccagcccggctcgccctcgacgtcactgacgatgatctgtgcagcgcgcagcgggcgacggccgcgcacttcggcgctggggttttcctggtcggcgacgtactggcggatccacttgttcagctccagctcgaggtcggtacgctccttccacgaccccagctgttcgcgttgcaggaccttcaggtaatgggccaggcggttgacgatcatcatgtacggcaactgggtgccgagcttgtagttcagctccgcggccttgccttcggcgctgatgccgaagaacttcggcttctgcaccgagctggcggagaagaacgcggcgttgtcgctgcccttgcgcatggtcagggaaatgaagccttcctcggccagttcgtactcgcggcgatcggacaccagcacctcggtggggatcttggtctcgatctcgcccatgctctcgaagtggtgcaacggcaggtcctctaccgcaccgccgctctgcggcccgatgatgttcgggcaccagcgatacttggcgaagctgtcggtcagcttggtgccgaaggcataggcggtgttgccccacaggtaatgctcgtggctgttggccacggtctccttgtaggcgaacgacttgaccggattctcttccggatcgtagggcgtgcgcagcaggaagcgcggtacggtcagcgccacgtagcgggaatcctcggactggcggaagctctgccacttggcgaactgcgggccttcgaaatgatccttcaggtccttcaggtccggcaggccggtgaagctttccaggccgaagaacttcggaccggcggccgccacgaatggcgcatgggccatgcaggccacgctggagacgtattgcatcagcttgacgtcgggcgaactgggcgacatgtagtagttggcgatgatggcgccgaccggctggccaccgaactggccgtattcggcggtgtagatgtgcttgtacaggccggactgcatcacctcgggcgagtcctcgaaatcgtccagcaggtcctgcttggaaacgctgagaatctcgatcttgatgttctcgcggaagttggtgcggtcgaccagcagttgcaggccgcgccaggccgactccagcgcctggaaatcgggatgatggaggatctcgtccatctgcgtgctgagcttggcgtcgatctcggcgatcatccggtcgaccatcgccttcttcaccggctcgccgtcgttctgcggcttgagcaattcctcgatgaaggcggagacgccgcgcttggcgatgtcgtaggcctcgtcgtccgggctcaggcgggtctcggcgatgatgctgtcgagaatgttgtattcgccgttctggttccggccttgctgtgcggcactggtgctcatgtatctgcttccttggctagggggtggctcaggcgtcctgggagggggcggcgctcagccccagctcgcccagcacacggctacgggactcgtcgtcggcgagtacgctttcgatggccttgcggaacgccggggcgttgcccagcgggcccttgagggccaccagcgcatcgcgcaactccatcagcttcttcagctcgggcacctgctcgacgatgctggccgggttgaagtccttcatcgagttgatctgcagccccaccgccagctcgtcgctgccgccctcctcctggagacgattgggtacgctcagcgtcagccccagctcctgcttggccaggacctcgtcgaaggtcatcttgtcgatgccgatcggcttgcggtcctccaccttgcgctcatccgcgcgctgggtgtaatcgccgatcgccagtagcttcaacggcagttcgatttcttcctgggcaccgccagtggcgggcttgaaggtgacgttgatgcgttcctttggggctaccgagccttctttggccatggctttttctccttgagaattgagggcgcgaagccctattcgagcaccacctcgagatcgaggtggcacagcctgcgataaatgtcttccttgcgttctcgcacggcgtggttctgcggcaacagctcgcagcagctatgcagcaggtgcagtacatccagcgccagatcgggctcccaggcgtgcaatcccgattcgtgcaactgatggtcgaggctctccagctgggtcttggccagctcgtacttcttcgccaggaagcacagtcgcgcgaggctcagttgccagaagaaccgggcgcgtccgccgtgggcgcgcttcatgccctgcttcaacacctgtaccgccgccttcaggccgtccttgcgcaacaccggctggacctcgtccagggcgacgtcccattcggcctgcagggccacggtctcgaccttgcgcggcgcactgtcgttctggagatggggcatgacatgggcgctgatccagccgcgggtggccgcatcggcgaatgcgctgccgtcgtggaaacgcagctccaccagccccggcagacgctgcaggagcaaggcgaaatgcatttcgacttcccgcatcgcctgctcggcgttgagcccttgcaggcactcccagaccaggcgctggccgtcgaaccagaacggcgcccgtgccaggctcgcctccagctccaccaggagatcggcgtacaggccctgggcgaaacgctcctggtagcttttcagcttgtccgccggcactccccttagcgcggtgacctgttcggcattgcgctcgggcatggactcgatgggcagccagagcatcgttcggttgaggcgcagcgcgcgcagatcggtggctttctgcttcagccaccaggcgcacagggggcgtgcggcctcctgctgggcgcgcatggccttgtgggcgtcgcgctcgttgtcgatgggcgcacccggcgccagcaactggctggccgcctgcttgacctgggccaccacggcgccgaccacgccaggttcgggctggttgtcggcggcgcgctggagcatgcccgaaaggcgtcggctgatcggcagcaacaagggcgcgtcgtcgcccagttgcgcggtcagcgcggtatcgagtttttccaggtgctcggcgagacgccggaacagggggagttgctccttgatcggtacgttttcgttcagcgcctgctccagccggggcaccagccaggcaatggccgcggcgcgagtgcgcgccttgagcggatggatctcgacccaatgccggctgcacagacgttccagcaatcccagtccggccagcaaaccgggaaaggattcccgttggtagagggcccaggtcaaccaggctgcaacacgcaggtccttggattgggcacgaagcagcgcttcgctgttttccaggattttcaaccagtcggtctggccgttctcatggagcgagagcgccttgcccagctcattttccagcgcctcgtattcgctggaaaaacgcacatcctcacccgcaaagacatcctttgaaatcggctgttccgcgagttccagataatgcgaggagagcttgctcgaataggtcatcctaacccttcaatgcacaccatgtgcgccaatgaatatcttaacaattcaactagttggcataaaaaccgaacgaaaatcccaatagtctgaagagctctttgccttttccatgaaaacaacataaaaactggcaagcaacaggacattccctctttgggaattttcctattcattgatacgaatcaatgaaagattttcagccaaacgtcaggcgtctgcgtccatgccctttacggcttggctatagccatcataacgacattgatggccatttggaaaaccctaccaaaacaggtagttaacaatttataaaaaataaggcaggcagtatggatttctccggagatcctcgaaacataggtcttccaagcggaccaacagctgatttagagcgtaatagcgattgtgcaagaagttgcacaatgaaaaccaagaaacatccccaataacagtccacagcccttgaaaatactggcctggacactactgcgcaaaagttgcacagcactgcgcaacttcttgctcaattcacttgttatatttcttttcagaatgagacatggataacaataagccattgaatgagattgattaaaagagccacgaaaagactggcacgggaattgttagggaaattaatcgagatgggcggtcccatggccaccggcgaggaagttgcgccgtgaccgactgcaggcgggacgcaccgctgcgtttaccctggacacgcccgtaccgcaccggctgggcggaaatcgatagcgacccgagcagtcaggaaagcaggattcgatgaccgccgcagcgcctatcgccaagccctcgatgaccaacttatgcggtaggccgcgtacggcgacgacagagaattgcgcaccgcttacccgctcgacagtgctgtgcgcctactggcgagaaagctgcccgacagtagtcgggtcggctagcgcggccagtcggtcgatgccctcctgggcatcgacctcaacggccagtaactgacccgccaccagcgcagcgccgggtaccaacagcagcgccaggaaagcgagctacgaataatcaggaaaaacgcgcatccagcccgatgcataaaaatttcgctctacccgaaactcccgctcatgacagaaatcactgcctcgccaaccgctgatcgaagctcccctcaatccagcatccccacataccccggcacctcccccactcgcttgatccacgcgcggatcgccgggtaggccgtcaggtcgaagccgccttcatgggcgacatgggtgtaggcgtagagggtgatatcggcgatggagaactgttcgccgaccaggaatggcgtgcgcgacagctgtttctccatgacgtcgagggccttgtagccgccgatcttcttctcttcgaactcggcgcggcgggcttccgggaggccgaggtagagcttgatgaagcgcgccacggccacatagggctcatggctgtattgctcgaagaattgccattgcagcacctgggtgcgcaggcgcggttcgctgggcaacagggcgctgccgtcggcgaggaagttgaggatggcgttggactcccacaggaaactgccgtcctccagctccagcaccggtatcttgccgttggggttcttcgccaggaactccggggtctgggtctcgcccttgagaatgtccaccggtacccactggtagtcgatgccgagcagcgacatggccagcttgatcttgtagcagttgcccgaacggtaatcaccgtagaccttgtacatcgtgtcgctcctcggatcggatggccggcgccctcggaggagcgccgatgagggttcaggccgcttcggcggcctgggcgtcgcggacgaccttggccaggcgccgcaggccttcgtgcaggcgctccggggcgacgtggctgaagttcagccgcagacgcccgaggttctgctccggctcggcgaagaaaggttcgccgggcatgaatgcgacatcggcggccagcgccggctggagcagggtgcgggtatccagcggctgcctgagggtcagccagaagaacagcccgccctccgggatattccattcggccagctcaccgaagtgctccagcagcgcctcctgcatggcgtcgcggcggacccggtagaactcgcgcagttcgaccaggtgctggcggtaggcctcgctgccgaaccattgcagcgcctgccactgccctacccggttggtatgcaggtcggccgactgtttcagccgcagcaggtgggggaacaggtccggggtggcgatcaggaaaccgacgcgcaggcccggcagcagggtcttcgacaccgtgccggtatagatccagctggacttgcgcaggcggctgaccagcggggttgcgcggccctcgtcgaacaccagttcgcgatagggttcgtcttcgatcagggtcacgccgaattcgtctagcagcgccgccaccgcgtcgcggcgttcctcgctgtagcgcacgccggacggattctggaaagtcgggatcaggtaggcgaaggccggcttgtgtcgctccaggcgctgccgcagggcaaccaggtcggggccctcggcacccagcggcacggtcacgcaatcggcgccgaacaattggaaggcctgtagcgcggcgaggtaggtcggcgcctcgagcagcacctcggtgcccggatcgatgaacagcttgctggccaggtcgagggtctgctgcgaaccgctgacgatcagcacctggctcgcctcgcaggggacgccgagggcacgcgcttcggcggcgatggcttcgcgcagggcaggctcgccttcgctcatgccgtactggcccatggaggccggcatctgctcccactgcaccttcggcagcatcggctcggccggcagcccgccggcgaacgacatcacctccggacgctgcgccgcggcaaggatttcgcggatcaaggagcttttcaggcgggagatgcgttcagagaaggccatgggatcaccggtagcgtaggcggggaaaaatgagtcaaactgcttgaccgaaactacgatgccgcacccggaagcgtcaatatgcctgacctgaaaaaccacgccgtccagcagcaggccatgatggaagccttcttcttcgcgtaccaggccttcaccaccaagcctgacgagatgctcgcccgccgcggcctgggacgtgtgcaccaccgcgtgctgttcttcatcgcccgctatccgggcctcagcgtgaaggaactgctggccctgctcggcgtgaccaagcaggcgctgaacatcccgctgcgccagttgctggagatgaacctgatcggcagcgccaccgccgacgacgacaagcgcaaacgcctcctcggcctcaccgccgagggcgtgcggttggaaaaggcgctgcgtcgcgagcagtcgcggctgctccaacgctgcttcgaggaagccggcggcgaagcggtctccggctggctggcggtcaatcgcaccctggctcgggcgcatgcaggcagccgcggcgaagcggcgacggaggccgccgactgacgccccatgggcctggcgcatggacgctcgacaagccgaccggctgcccgctagctccgctccaactcccgcgccgcgcgccagcaggccagcgccatggccacggtggcggccagcagcggcagtaccgccagcaccagcaacagcaccgaagccagcatcgcgccgccggcgatgtccagccaggccatgatccgcagcgacggatagaggttttcctgcttgagcagacgcaggcccagccagagggtggtagcgccgatcagcgcaagcagcgcgaagtacaccagcgcctgccagttccagccctgcagcgcatcgtcggtaaccgccagcaggctccagccctcgcccagcagggtcaggagaatcgacaaccataccggccaggccagcgaggggccgcgaaagcgcgactcgaccaggtgcttgagccgcagcagcaggtaggcgccgagcaggctgaggagcaggcccagccagtcggcgtagaccctgaacgcggcgccgtcgccgaatgcctccagcaggctgagcaccatcagcaccacgccgccggctatcgaggccaggcagagccaggcgaggatgcgcagttgcgcgggcgtccagcgccggcggaaagcatccggtatgccctgctcgaccaattcgacacgcggcgtggcgtaggggtttgcatccatggcgaagctcctcggcaaatgccgggaagttaccagctccgccagcttccggcagctgcgactgtatggccaactatgtccgcggctgtaccgggacagcccctggccggctgtttaggctgcgcaaaacagaaaaagatgatcggcactccgcgcctcgcgcaacctgccccgtggctccgcccaccgccgtgcccggtcgtcccgcacactccatggaagtacccggcatgaccgaaaccacccagccccagcctcgtctgcgtccgttcgccgactcctctcccgccgccgtggtggccggcttcgtcgccatgctcaccggctacaccagctcgctggtactgatgttccaggccgggcagaacgccggtctcagcagcgcgcagatttcctcgtggatctgggccctgtcgatcggcatgggcctggcgaccatcggcctgaccctgcgctaccgggtgccgatcgtgatcgcctggtccacccccggcgcggcgctgctgatcagcagcctgcccggagtgccgtacagcgaggcgatcggcgccttcatcgtctgcgccctcctgatcaccctgtgcggcgtcaccggcagcttcgaacgcctgatgcgccaggttccctcctcgctggcctcggcgctgctggccggggtgctgttccgcatcggcatcgagatctgcaacgccgccgagcaacagaccctgctggtgctggcgatgttcttcagctatctgctgtgcaaacgcttctcgccgcgctatgcggtgttcgctgcgctactggtgggggtgctgctggccgggatactgggccaactggacttcagcaggttccgcctggaactggcggtaccggagtggaccacgccgagcttctccctggccgccaccatcagcatcggcatcccgctgttcatcgtcgccatggcttcgcagaacatgcccggcatcgccgtgctgcgcgccgacggctaccaggtgccggcctcgccgctgatctcgagtaccggcatcgcctcgatcctgctggcaccgttcggctcccacgggatcaacctggcggcgatcagcgcggcgatctgcaccggtccctcggcccacgaggacccgcacaagcgctataccgcggcgctctggtgcggcttcttcaactgcgtcgcaggaaccttcggcgccaccctggcagcgttgttcgcggcgttccccaaggcactggtactgtccatcgccgccatcgccctgctcggctcgatcatgaacggcctggccaactcgatggccgacgagcgccagcgcgaggccgcactggtgaccttcatggtcaccgcctccggcttcaccctgctgtccatcggctcggcgttctggggcctggtggccggcctgctgactcagttcgtgctcaactggcggcgcggctgaccgacctcagtccggcgccgtcacgggcgccggcgcggcctggtggccacggctgacccaccagccgaaggccgccgcggtgaagaacatcagcactccgtagatcgccggcggaatcgccatggtgctgttgttcagcaggctcggactcagcgccagggcgatcgccagggtgccgttgtggatgccgatctccatgccgatggccaccgcctgggccttcggcaggcgcagcaggcgcggcatccagtagcccaccgccaggctcagcaggttgaaggccagcgcggccagcccgaccaccggcgcgtaggtgacgaaggtctgccagtccttggctagcgccagcaggatgatcaccagcaacagcagcgcggaaaggatcttcaccggcttctgcaggcgatccgccacggccggcaggcggttgcgcaccagcatgccgatggccaccgggccgaggacgatgacgaagacctgcacgaccttgccgaactgcaggggaatcgcctgcccgtcgcccatgaagtattgcagcgacagattgacgatcagcggcatggtgaggatggcgatcaccgagttcaccgcggtcagggtgatgttcagtgccacgtcgccatgcgccaggtggctgtagaggttggcggtggtgccaccgggcgaggccgccagcaacatcatgccgaccgccagggccgcctccagggcgaagccctggacgatcaggaaacaggccaggggcagcaggacgatctggcacaccaggccgaccagcaccggcttcgggtagcgcaccacgcggaggaagtcggccggggtcagggacagtccgagaccgagcatgatgatgcccagggcgatagggaggaacagggtcaggatgggatcggcggtcattattgttattgctccgatgcgatggagacgggctcaggccccggattctcgacccaggttagtcccccggcagtggcctggcgcgccaaaccgcgcgccgacctgtaacagaatgcgaatgccccgcgccggggcatcccggttgtatcgccgcccgctcagatcgccgtcgccccgccgtccaccggcaaggcgataccggtggtgaagcctgcgttgtcgctgcacagatagagcaccgcggcggcgatttcttcgacccgcccgacccgacccagcggatgcatcgcggcggcgaactcggccttgcgcggatcggcctcgtaggcgcggcggaacatgtcggtgtcgatcaccgccggacacacggcgttgacgcggatgcccttcttcgcgtactcgatcgccgccgatttggtcaggccgatcaccgcgtgcttggaagcagcgtagatgctcatcttcggcgccgcgccgagcccggcgaccgaggcggtgttgacgatcgcgccaccgccctgggccagcatcagcgggatctggtgcttcatgcacaaccagacgcccttcacgttgacagccatgatggcgtcgaactcggcttcgttgccgtcggccagcttgccctgctcgatctcgataccggcgttgttgaaggcgtagtcgagacggccgtaggccgccgcgcaaccctctaccagcgccttgacctcggcgtcgcgggtgacgtcgcagcgaatgaagacggcttcgccacctgcctggcggatcgcttcgaccgtgccctcgccgccggcgctgtccaggtcggcgaccaccaccttgaccccggcggcggcgaaggcctgcgcggtagcgcggccgatgcccgccgcaccgccagtgaccagcgcgacctggccggaaagaagtttgctcatctgctgctcctcggaaaatcgccttccgccaaccgcgacggaaccgggccgcgccagtctagccagggccggcgcaaggcatagcactatcaggggactggaggatgggccatccagcccgctgataagactgatggcggcgaatcatcggcatagatgaccggtcatttccgcactcgccttcgcttgccgccggcgccggcgccagctatccctaggggcctgtttcccgacattcgagagccctgccatgacctcccagatcaatcggcaataccagttggcccagcgtcccagcgggctgcccggccgcgacaccttcagtttcgtcgaaaccccgctcggcgaaccggccgagggccagatcctggtgaagaacgagtacctgtcgctggacccggcgatgcgcggctggatgaacgacgcccgctcctacatcccgccggtggggatcggcgaggtgatgcgtgcgctcggcgtcggcaaggtgctggtttcgaagcaccccggcttccaggccggcgactacgtcaacggcgccctcggcgtgcaggactatttcatcggcgagcccaagggtttctacaaggtcgacccgtcccgcgcgccgctgccacgctatctctcggcgctgggcatgaccggcatgaccgcctacttcgcgttgctcgacgtcggccagccgaagaacggcgagaccgtggtgatctccggcgccgccggtgcggtgggcagcgttgccgggcagatcgccaggctcaagggctgccgggtggtaggcatcgccggcggcgccgagaaatgtcgcttcctggtcgaagaactgggcttcgacggcgccatcgactacaagaacgaagacctcgccgccggactcaagcgcgaatgcccgaagggtatcgatgtgttcttcgacaacgtcggcggcgaaatcctcgacacagtgctcacccgcatcgccttcaaggcacgcatcgtcctctgcggggcgatcagccagtacaacaacaaggaagcggtgcgcggcccggccaactacctgtcgctgctggtcaatcgggcgcgcatggaaggcatggtggtgatggactatgcccagcgcttcccagaaggcctgaaggagatggccacctggctggcggaaggcaagctgcaatcgcgcgaggacatcgtcgaaggcctggagaccttccccgaaacgctgctcaagctgttcagcggggaaaacttcggcaagttggtgttgaaggtctgaggtccgccgccggcgcgaagaagcggcggatagcgcctcgcctcgaagagcgtgtgcactgaagaaataatgattcccggcaatcctgccgcctgtccttcgggctaagctgcggcatccgcgcctgcaaggaatcagccgcatgccactcgcccgctgggtacccggactcgatagcctgctccactaccgccgcgcctggttccgtccggatgtccaggccgggctgtcggtagcggcgatccagatccccaccgccatcgcctacgcccagatcgccggcttcccgccccaggtaggcctctatgcgtgcatcctgccgatgctgatctacgccctgatcggcagctcgcggcagttgatggtaggccccgacgcggcgaccgcggcgatggtcgccgccgccatcaccccgctggcggcgggcgatccgcagcgcctggtggacctgtcgatgatcgtcgcgatcatggtcgggctgttctccatcgtcgccggcctggcccgcgccgggttcatcgccagcttcctctcgcgaccgatcctggtcggctacctcaacggcatcggcctgagcctgctggtcgggcaactgggcaagctgttcggctacgaggcggcgaccagcggcttcgtcgccggcatcctcgcgctgctggagaacctgctgcacatccattggccgacgctgatcctcggcagcctctcgctcttgctgatggtgctgctgccgcggcgcttcccgcagttgcccggggcgctctgcggcgtcctcctggccagcctcgccgcggcgctgctgggcctggatcgctacggcgtggaactgcttggcgaggtaccggccgggctgccgcaactgagctggccgcagaccagcctggaggaactgaaaagcctgctgcgcgacgccaccggcatcacggtggtcagcttctgcagcgccatgctcaccgcgcgcagcttcgccgcccgtcacggctacagcatcaaccccaaccacgaattcgtcgccctcggcctggccaacatcggcgccggggtctcccagggcttcgccatcagcggcgccgactcacgcaccgcggtgaacgacatggtcggcggcaagacccaactggtcggcgtggtcgccgcgctggtgatcgccgccaccctgttgctgctgaacaagcccctgggctgggtgccgatgccggcgctcggtgcggtcctgttgctggccggctggggcctgatcgacgtgcaggcgctgaagggcttctggaagctcagccgcttcgagttcagcctctgcctgctgaccaccgtcggcgtgctcagcgtcggcgtgctgccgggaatcttcgtcgccgtcagcatcgccgtactgcgcctgctctactacacctatcgcccgagcgacgcggtgctcggctggatgcacggcatcgacggccaggtcgagctggccaagtacccgcaggccaccactcttcccggcctggtgatctaccgcttcgacgcccccctgctgttcttcaacgccgactacttcaagcagcgggtgcttgccgtggtggacggcagcgagcggccgaatgcggtgctgctcaacgccgaagccatgaccaacctcgacatcagcggcctggccaccctccacgaggtgcaacagatcctcaaggcccagggcgtgcacctgtcgctggcgcgggtgaccgggcagacgctggacctgctgcaacgctcgagcatgctcggcgagatcaagccgccgctggtgttcagctcggtgcgctcgggggtcagtgcttatcgctactggctgcgccagcaggaaagactcgccgcccaggccgcggctacaagcggaaatgcctgaccatgccctgtagttcgcgccccagcgccgccagttgttcgctggacgaagccgtcgactgcatggcttgggccgactgatcggccacctcacggatcgccgtgacgctgcggttgatctcctcggcgaccgcgctctgctgctcggaggctgcggcgatctgctggttcatctgctggatcagcgccaccgccgtagcgatgttgcccagcgccgcctcggtctgcaacgcgtcgtcgacgctctggtccaccaactggtggctgcgctgcatacgctgcaccgtctgctgcgtgccattctgcaaggcaccgatcagggtctcgatctcggccgtggactgttgggtgcgccgcgccagcgcccgcacctcgtcggcgaccacggcgaagcctcgaccctggtcgccggcccgcgccgcctcgatggcggcgttcagcgccagcaggttggtctgctcggccacgctcttgatcacgtccagcacgctgccgatgcgctggctgtcggcgctcagcgcctcgacgctggcggtggccgcgcgcaccgcctcggccagtcgctcgatccgctccagggtctggcgtaccacctcctggccgacgctgaccttgccgtcggcgctttccgccgcccccgcggcttcctcggcgttgtgcgccacctcatggacggtggcggccatctggttcatcgccgtagccacctgttcggtttccgcccgctggctgtcgattcccaggcgggtgcgcgtggtaacgccggacagcgcctcggaagcgccggcaatccgcccgacgccgtcctgcaactggctgacgataccgcgcaggctgccggtcatggcgcgcatcgcggccatcagttggccaacctcgtcgcgccgctcgctgtcgacccgtaccgccaggtcgccttcggcgatccgctgcgccacacccatcgcctggcgcagcggacggacgatcagcaggctgatgccgaaggccgcgcccaggcccaccagcagcgccagcacggcggcgccgacgatcagcagggagtttgtccgcaggctgtggagcatggcctgctgctgcgcctcccagctacggtcgacatgcgccatcacctgcccggcgcgctcgcccatggcggcgtacatctgccgctcctggagctgactggcgcggtactcggcgagcttgtcggcgaaaccgcggatattggtcagtacatccttgaccaccgacacgtaggcatcgtcggtgatcgcctgctccagcagggctgccagctccagcgcctcgcgcagcgatttcggcggcccctcctgcgcatccgcggcgcgcgcttcgagacgcgagcgggcctcgtccagcccctgaaggaccaggcgattgacctgggcgacctgggccgcctgctgcaacagcggctcgccgtcgtgcccctggctctccttcagcgcataggcgccatcctcggccaggctggactggaggatatcgaggctgttggcggcgccgttcagcgaccagctggcgctttcccaagccaattggcgtccctggatggactgctcgaagcggccgaacgcttctaggtatgccgccagcacctgctccacctcggccatgccaagcgcctgatcggcgtcgccgtcggccttgagccggcccacccgttcaagggtcgcggccaggcgctggcgcaagcgctcggcgtcgctcttttccccgtgcagggcaaagtccttctcggcctggcgaacctccagcacgtcgcgattgatcgcgctcatctcctgcaggcgcgcgaagcgctgccccagcgcatgcagcgagagcaccgcgagcgcggccaccagcgcggtcaatagcaggaccagggtaaaaccgatggccagtttcttcgccgtgccgagatcggccagacgcctgcgcagcaaccccagcatgactcccctccccccgtgacgcgccgtctgcgtgcgcatttcccgctgtgtcgcgcgtttttcgccgaacctgagcggccgggcaaggtagtggcacgacaatggccaggagagatatgcgcaggtcgtttccaggatatccgggctgacctcggtcgagcgcggagccatactgggcgccccatggaaaaaggagcttgccatgcgtcccgtattgccgctgttgctgtcgctgagtctgtgcgcccccgccctggccgactggagcggcccgatcgagcagccgctctggtcgttgccggcggcgccgggcctgtcgcgctggctgatcgtgcacaacctgtcgagcgcggcggccgacggcctgtaccacgtcgaggtcctggagcgccgccagggccagcagccctggcagttccagcgcctggccgcgcacctggcgctgaccgaacaggcgctgcgcgcgagtatcgtggcgccgctgaagcgcggcggggtatatccggaaagctaccagttcgcctatcgccagtggcaggaacgccaggccgcgggccaggcgccggtgtgccggcgcacggtcgacgagtgcctgcgggcgccggactgagcccggctacctgggccggatcatgctgaacgtgtcgcgggtatggctgtagtggctgccgcccaggcgaccgaccaggtcgagccgggcgctatccacatggcgctcgtcggccagcacggcatcatcgacatgggccagcagcacgcgggcgaagatcaggtggcaattggggttctccgccggatacggcttgatctccgccacctcgcactcgaaggccaccgccgccgcggcgatccgcggcggcgccacgcgtacgctggacacggtagggatgccgaccgtctcgatctcgctcacaccatggggcagccaggcggaggtggcgttcatggtctcggcctgggcggcgccgaccaggtggatcaccaactgcccggtggcctggacgttgcgcagggtgtccttgaggctgccgtcgtcgcgcaggctgacgttaaccatcagggtcggcggctcgtcgctgatcacctggaagaagctgaacggggccaggttgctggcgccctcggcggacagggtcgagacccaggcaatcggtcgcggggtgacggtggaagccaaccagcgataggcctcggcgggagcgatggtggtgaagtccagttgcatggcggtctcgcggaaatcgacggaggggacgccgattatgccgcagccccgcagctctcgcgaccgtctgcgccgcggccctgcgccacctggaggcagcggctagacttgccctaccctcacccaggagccttgccatgaactatcgaggaagctgccactgcggaaccatcgcctacgaagtcgaaggcgacctcgaccaggtgatccagtgcaactgttcactgtgcagccggcgcggctggctgctgtggttcgtcccgcgcgaccgtctggcgctgaagacgccggccagcgcgatgcacacctataccttcaacacccatcgcctgcagcatcacttctgccccacctgcggctgcgcgccgttcagcgaaggcataggcccggacggccaggcgagggccgcggtcaacgcgcgctgcctggaggacatcgacgccagcgcgctcccggtacagcactacgatggccgcaacgcctgacgctggcgcaggtagccgatcacctcggcctggttgccgcggaactcgacgcggtcttccttgctctgccgctggaaggcgtacatcgggtcgtagtactccttgagcagcccctcgatccagccgcgatgggtatccaccgagccgtcgcggccctgctcttccagcgcctgcacgaggatcgccgccagccgctggtagcgctcgccgccgaggcgcttgacgatgccggcgaggctcttctgcaggtaggcggagaaggcggcgaagccctcctccacgcccaccacgcgctcgaactcgctgcgcaggtcgatcacgtagtccctgaggatacgctcgacacgctgctcgaaggcatcctccagccagaccagcgggtagccctgcatgccctggtacagctccagcggcaaggagcagctgccgacgatccgcccctcgtcctcgaggacgaactggccgacgccacgatgacgcttcttcaggatgtcgatggccaggcggttctcgaagtcgatctgcgccggctgcggcgtggctcgccggccaaagctggagccgcggtggttggcgtggccttcgagatcgaggctgttgtccagcgccgcgatcacctcggtcttgccgcaaccggtgaggccgccgaccagcacgaaatcgcactcgtcgaccgccgctcgggtggtttcgaaaaggaagttgcgcaacgccttgtagccgccgatcacccgtgggtagtcgatgccggcgtcctgcttcagccactgctggacgatctgcgagcgcaggccgccgcggaagcaatacaggtagccgttcgggttggcttcggcgaaggctttccaggccgccagccgttcggccttgagcgccccgcagaccagttcgtgaccaagggcgatggcggcctgctggccgtgctgcttatagctggtgccgaccttctgccgctcgatgtcgttcatcagcggccggttgaccgtgttgggaaaggcgcccttgtggtactccaccggggcgcgcacatccatcagggggatatcgtcgagaaacagctcgcggtagtgctgggtgttgtcgcgcattacagcacctgtaccgcgagactctgtcgctcgaccagttcgccgatcggcgccagttgcaggccgagttccgccgccacggcgaggaactccgcctcgccttccggagccaccgccaccagcaggccgccgctggtctgcggatcgcaaagcaacagcttctgcacctccggcagtggcgcgatgcgctcgccatagctgtcgaagttgcgcagggtgccgccgggcacgcagccctgctccaggtaatattcggcactggccaggcgcggcaccgcggcgtactcaacgcgcgcggtgagcttgctgccgtcggccatttccaccaggtggccgagcaggccgaaaccggtgacgtcggtcatcgccttgaccccggccaatcgaccgaagcgcgcgccgggcctgttcagggtgcacatccaatcgcgcgccacgccgacgtcctcggcgcgcagcctggccttcttctcggcagtggtgaggatgccgatgcccagcggcttggtcaggtacagcctgcagccggcctcggcggtgtcgttgcgtttcatgaaacgcttctccaccacgccggtcacggccaggccgaagatcggctcgggggcgtcgatggagtgcccgccggccagcgggatgccggcttcctcgcagaccttgcggccgccggcgatcacctcgcgggcgacttccgcggccagcacgttgaccggccagccgaggatggcgatggccatcagcgggtcgccacccatggcgtagatgtcgctgatggcgttggtcgcggcgatacggccgaaatcgaaggggtcgtcgacgatcggcatgaagaaatcggtggtggagaccaccccgcgctcctcgtcgagggcgtagacagccgcgtcgtcgcgcgaggcgttgccgacccagagcttcggatcgaggttctgcgcgccgctgccggcgaggatcacctccagtaccttgggcgaaatcttgcagccgcagccggcgccgtggctgtactgggtcaggcggatcgcctcgctcatcggtgtactcccgtggatgtcggaaaagtgcccattctagcaaagccggcgccgccgccagagggccgatcgccgcgcccggctcagcgcccggcgcgcgactcgcggatatagaagcgcgccttctcggccttgctggtgcagccctcgtaggcttcgaactgctgctgggtcttggccccggtgagcagggtcagggccttcgagtagctgacggtgccggcgaagccttcggccttggccaggtcgagttccttccaggccgcgtccaactggtcggcgcagttctcccggtaggcggtcttgccggcgcagccggccagggtcagggcaaggacgggcagaacgatccaggttttcatcgaacgatctccggacagggaaagggccgcgcatcgccgcgacgcacttggcggcggccgggcgacacgcgtatcgttttcgcttcgtcacgcagtattggcaaggggttgcagatgagcaaacaggtcgccctggtattgggctccggcggtgcgcgcggctacgcgcacatcggcgtgatcgaggaactcgaggcgcgcggctatgagatcacctgcatcgccggttgttccatgggctcggtgatcggcggcatctacgccgccggcaagctgcgcgagtaccgcgagtgggtggaaagcctggattacctcgacgtgctgcgcctgctcgacgtcagcttccgcctcggcgcaatccgcggcgagcgggtgttcggcaagatccacgagatcctcggcgaggtgaacatcgaggacctgtcgattccctacacggcggttgccaccgacctcaccaaccagcaggaaatctggttccaggaaggctgcctgcaccaggccatgcgcgcctcggcggcgatccccagcctgttcaccccggtcatgcagggcagccgcatgctggtcgacggcggcctgctcaacccgttgccaatcgtgccggtggtgtcggcccacagcgacctgatcattgcggtcaacctcaacgccaccaaccagaagcagtaccacctgccggtgatcgagcgtccggcagcgctcaaggggcgcttcgacagcatgatcgagagcctcggccacaaactctcgttcttccgccgccacggcgacgacaataccccgccggagctgagcgccgacgccctgctccatccggttccggcggaatccgaggagcccgccgagccgcaactgcaacagccggccgcggcgccgcaaggcaaggactcgccgaagtcggccagcggcaccacggtggtggaaagcagcggtccggcatcgctgctggaactggtcaaccagagcttcgaggtgatgcagacctcgctggcgcagtacaagatcgccggctacccgccggacatcctgatcaacgtgccgaagcgggtctgccgcttcttcgagttctacaaggcgccggagttgatcgccctcggccggcagatcgccagcgacaccctggaccgctacgaggaagacaacgcctgagcctcagcggctgaactcgaggacctcgtagccgccgcgccgttccgggaacagcaggaggaagccgccggcgtgcgggcgcagcagcgcgaccacgtcggactcagccggcgcgccgtgggccaggccactgaaggccacctggggctcgtcgttgaccgtggcgccgccgaggaacacgtagcgctgcgtgccttcgcggaacaggtagccgctgacccgctgcgaaccgctggtcttctccaggaacaggccgcggtcggtacgccggatgcggcactggaagttcggatagcgatagatgccgtactggtcggcctgggtcgagcggcacttccagtcgcccagcaggcctttctcgtcgacggcgacgacgggctgcgccaggctgagttccagttgctccagttccggcaggaattcctcgaaggcactgtcgtagtagcgcttgttgatggcctcggcgtcctgctcgacggccagcacgctgcgctgctgctggtcgctggtgtagccacgccagtccggctcggcggcgccggcgtgcgcgcaggcggcgagaacggtgaggcaggcgaagacactggaaacgggaatcgggcgggacatggcgaccatcctggcgagtggaccggcgcatccggcgccggcaagcggtagccgcagaacatagcgcagcggcgccgggaattcgagcgccgccacgacgggcggcggtttcagaagatcgaccagccgatccgctcgctgagcttctccagcgcggcgatacccgccagcgaattgcccgcggcgttcagctccggcgaccagacgcagaccgtgaagcgccccggcaccaccgcgatgatgccgccgccgacgccgctcttgcccggcaggccgacccggtaggcaaagttgccggcctcgtcgtagagcccgctggtggccatgatcgcgttgacctgcttggtctgccgctcgttgagcacctgctcgccgctgtgcttgcagaagcccttgtcggcgaggaagcagaacgcccgcgccaggtcgacgcagctcatgcgcagcgcgcaatgatggaaatagctgagcagcaccgcctcgacgtcgttgtggaagttgccaaacgatttcatcaggtaggccgccgccgcgttgcgcgagcggtgctggtactccgagcgcgccaccaccgagtccgacaccacttccgggttgccgcacaggcgccggacgaaatcgcgcatcgattgcgccggcgcggcgaaacgcgactggttgatgtcgcagatcaccagggcgccggcattgatgaacggattgcgcggcttgccgcgctcgaactccagctgcaccagggagttgaaaggctggccggagggctcgtggccgaggcgttgccagatgtcctcgccggaatgctggatcgcctggaccaggctgaacaccttggaaatgctctggatggaaaacggccgcagggcgtcgccggcatggaacagctcgccgtcgcggctgtacacggcgatccccagttggttcggctcgacgccggcgagcgcgggaatgtagtcggcgaccttgccgcgcccgatcagcgggcggacttcatcgagaatctcgttcaacagttgctgcatgatgaccttcgtggtgacaccggggcgccgacccggcgcatccgggccagcgcgaatgcgcggcatcataggcgatgaacgcgcgggaggcatgcccctcgcgcagaattgcgctgcgcgtcagctgtcgcgcaggcgatagccgacgcccgcctcggtcaccaggaagcgcgggctggccggatcgtcgccgagtttctggcgcaggtggccgaccacgacccgcaggtaatgggtgtcttcgacgtgggtcgggccccagatatccttgagcagttgctgctgggtcactacccgtccgagatggcgtgccagcgcggcgagcaccgcgtactccttacgcgtcagcgccacttccgcaccctccagggtgactcggcgataggcgaagtccacctgcaacgggccgaccgccaccgacgcctccgggctttcgccctgcgccgcctggcgcagcaggacgcgcacgcgggcgaggaactcctggatgccgaacggcttggtcacgtagtcgttggcgccgccgtccagggccagtaccttctcgccctcgctggcgcgcaccgacagcaccagcaccggcacctgcgaccattcgcgcaggtcgcgaaggatgtcctggccgtcgcggtccggcaggccgaggtcgagcactaccaggtccggtcggttcagcgcggcctgggccagcccctcttcgccggtgccggcctcgagcacccggtagccctgggcattgaggctgatacggaggaacttgcggatctgcggttcgtcgtcgatcagcaggatgctgttctgcaattgggtcatggcactcggcacggcaggtgaacacggcgacaggccagcggcggcgtcgcggaaccggcaggaatagcgcgagcgcgggcgccaggcaagtgcgccgggctcattcgtcgccctccagttgcccgaggtccggctgcggatgcagcggcaggtgcaggaccagcgtggtgccgcgaccgtcgaggccttcgccgacgctgatgcgcccgccgtgggcgccgatcatgccctggcagatcgccaggcccaggccggtgccctggccaccgcggtcgccacgggcagcggtgtagaacatgtcgaagatcttctcccgctcggcctcgggaatccccggcccctcgtcgctcaccgcgaaacgcagctcggcggcatcctggctgacctcgatgcgcaaccggccgtggctcggcgagaagcgcgcggcattttccagcacgttgatcagcgcctgttcgatcagcgccgcatgcacgtagagcaacggcaggtcgttggccacgatcgcctgcacccggtacggcgccagcaccgcgcgcaggcggttcagcgcgctgccgacgatgtcgcccggcgccacccagtcgcgcgccagcttcaggccaccgtggccgagacgggtcatgtcgagcaggttctggatatagcggtccagtcgctcggcctcgtcgcgggtgctttccagcagttcgcgacgatccgccggcgggatcgcctcgcccagcgccaacaggctgtcgatggagccgcgcatggccgtcagcggcgtgcgcaggtcgtgggacaccgaggcgagcaaggcgctgcgcagttgctcggtttcgccgtgcaggcgcgcggcctccaggtcctcggccaggcgagcccgcgccagggcctgggccaggggctggccgagggcggcgagcaggcgccggcgctgcgggctcagcggctggccgtcaagcggcgcgacaccgagcagtgccagcggtccctcttccgccgacagcggccaccaccaccagcgtcctccgggcagcgtgccagtaccgaggccggccggctggtcgtgggcccaggcccagtccgcggcgacccgttcctggtcggcgagttgccgctgcacgccggcctcggtcttccactcgccattgacctgaccgagcaggcagacctcgacgtccttccagtcgtcgaactgctgggcggcggcggccagcaccgcctggcggtcggtggcggcggtgagcttgcgcgacagctccagcagcaggctggtttcctcctgggtatcgcgcagcgcctccagctggcgccgctggcgtgccgccaggttgccggtgaggccggccatgaacaggaagaacgccaggctcagcaggtcttcgtggcgatggatggcgaaggaaaaatgcggtgggatgaacaggaagtcataggccaggaacgacgccaccgcgcacagcagtgccggcatcaggctgctgcgcactgccaccagcagcaccgccatcaggaacaccagggagatgttcggcagctccagcaggtgcgccacgacccaggccaggccgctggccagggcggtcgccagcagcgccagcagatagtcgttccacaccaccggatagcgtggccgcggttccgccgggcgcaggtcggcctcgctgtccagggcactgatctccaggccctggccgtcgcgcagcagacgcccggcgagaccaccgccgaaggcccggcggtaccagcggcgccgcgactggccaaccaggaccaggctggcgcggcgctcgcgggcatgttgcaggagggtccgcgccacctcgccggcgcgcagcacgacgatctcgccgccgagccgctcggccagttgctgcgcaccctgcaggcgcatccgcgcctgctcgccgcgcaagccgccggtatcgacgtgtaccacgctccagggcaggtgccgacgttcggcgacccggcaggcgtggcgcaccaggcgttcggcctgttcgtcaccgtcgatgcccaccagcagccgcccgcgcaacgccggcgcttcctcgccgcgctggcggtagcggtggttgaggtcggcgtcgacccgcgcggcggcggtctgcatcgccagttcacgcagcgcggtgaggttggtctgcgagaagaacgcatcgatcgccgcccgcgcctgttccggcacgtagaccttgccctcgcgcaggcgctccagcagctcgcgcggcggcaggtcgatgaggacgatctcgtaggcctcctgcaacacccagtccggcaccgtctcgcggacctgcacgccggtgatgtcgcggacctggtcgttgaggctctccaggtgctggacgttgaccgttgtgtagacgtcgattcccgccgccagcaactcctggatgtcctgccagcgcttggcgtggcggctgccgggaacgttgctgtgggccagttcgtcgaccagggccagcgccggcgggtcggcgaggagaccgtcgaggtccatttcctgcagtttcatccctcgatactcgaggctgcgcagcggctgctgcggcacgcctgcgaggagggactcggtttccgcccgcgagtgggtctcgaccaccccggcgcgcagtttcacgccctggcgcaactgggcctgggcggcctgcagcatggcgaaggtcttgcccacccccggcgccgcgccgagaaagactttcaggcggccgcgcccgtcagcgggcaggtcggccagcagcgcgtcggcgcgtgcggtgtcggtcatggatcggtcgtactccgttgctctgcgccgcgcagggcggacgatcgccggcgatcatccgccgatgcggcgatattgcaagcccttgcgtgggtctctggggaaacctagcgcttcaaccccgccagcgccatgttcagcgccagcacgttgaccaccgccggccccaccagcggccgctcggtgtggctttccaccaggtcttccaccagccgcagcggcagcccgcgcgccgtggccacccgcagcgcctggtaacgcgcggcctgcggcggcagctgcggatcgagtccgctaccggaggtagtgaccagcgccagcggcaccggcccctggtcggcgatacgctcctgcgcggcgtccctggcgatgcgctcggccagtgccgggttgctcggcgccaggttgctcgcggcactggaaacggtggcgtagtcgcccgccgaaggccgcgaatggaaccactcctcgccgtcgaacttctgcgcgatcagccgcgagccgagcaccttgccctcggcgtcgcgcagcaggctgccattggcctgctcggggaacgccagttgggcgataccggtgaccagcagcggataggccacgccggtgaccaggctcagcaccagcagtgacgccagtgccggacggagttgcttgaacatgtgcagatcctctcttcagtcccaggccctcgcccgacggcgagggccgttgttcatgccaggccgacggcggtcagcagcaggtcgatcgccttgatcccgaggaacggcgccaccaggccgccgacgccatagatcagcaggttgcgctgcagcagttgcgaagcgtccgccgcctgcacccgcacgccgcgcaaggccagtgggatcaacgcgacgatgatcagcgcgttgaacacgatggccgacaggatcgcgctctgcgggctttgcaggcgcatcacgttgagcacgtcgagctgcgggtagatgccgacgaacagcgccggcaggatggcgaagtacttggccacgtcgttggcgatggagaaggtggtcagcgcgccgcgggtgaccagcaactccttgcccacctggaccacgtcgagcagcttggtcgggtcgctgtccaggtcgaccaggttggccgcctcgcgggcggcctgggtgccgtcgttcatggccatgccgacgtcggcctgggccagcgccggggcgtcgttggcaccgtcgccgcacatcgccaccaggcgaccttcgccctgctcctggcgaatccgcgccagtttcttctccggggtagcctcggcgatcacgtcgtcgaccccagcctcggcggcgatggcagcggcggtcagcgggttgtcgccggtcaccatcacagtgcggatgcccagccggcgcagttcggcgaagcgctcgcgaatgcccggcttgaccacgtccttcaggtgaatggcgccgagcagccggccgttggctaccaccagcagcggggtgccgccgctctgggcgatcttgtccacctcccgcgaaagcacctcgggcatcttctcccgcggcaggtcgatgaagcgcagcgccgcatccaccgcccccttgcggtacacctggccgttccagtcgaccccggacaagcgggtttccgcgctgaaggcgatcggcgtcagctcctcgcggcgcggctcctcgatcggatgcaggatgcgcaggtattcgacgatcgacttgccttccggggtgtcgtcggccagcgaggccagcaacgcgccctcggccagttccttgccgctcacccccggcgcggcgtacagcgcgctgcagcggcggttgccgaaggtgatggtgccggtcttgtcgagcagcagcacgtggacgtcgccggccgcctccaccgcgcgaccggacttggcgatcacgttcaggcgcaccaggcggtccatgccggcgatgccgatggccgagagcaggccgccgatggtggtcgggatcagcgtcaccagcagcgccaccaggaacaccagcggcaggttgccgccggcgaacagggcgaacggcttgagggtcaccaccaccagcaggaagatcagggtcaggccgatcagcaggatgtccagcgccacttcgttgggggtcttctgccgcttggcgccttccaccagggcgatcatccggtccagggtcgactcgcccgggttggcgccgatccgtaccagcagccagtcggacaccacctgggtgttgccggtcaccgccgagcggtcgccgccggactcgcggatcaccggcgccgattcaccggtgatggcggcctcgttgaccgccgccacgccttcgatgacttcgccgtcgccgggaatcatctcgccggcctggacccgtaccacgtcgcccttgcgcaggctgctggcagcgacgctctcgaaactgccgtcggcgcgccgcttattggcggagaggccctggctgccggccttgagactgtccgcgcgggccttgccacgcccctcggctagcgcttcggcgaagttggcgaagagcacggtgaaccacagccagagggcgatctgcagcgccaccgaggtcggcaccgcctggtcggggacgaagcacagcaaggtggtgagcacggcggtcagttcgaccaccagcatcaccggcgagcgcagcaactggcgcgggtcgagcttgacgaaggcttgcagcagcgccggccgccacaaggcggcgaggctggtggacgcgttgtggcgacgttcgagcgatttgtgcaaggcgttcttggacgcctgggtctgagcgttcatgtgcgattccttcagaagccgaggctcagttgttcagcgatcgggccgagggccagggtcggcaggaaggtcaggccgccgaccagcaggatggtcacggtgagcaggctgacgaacagcggaccatgggtcgggaaactgttcggccccaccgggctggccttcttcgccgccaggctgccggcgatggcgaggatcggcaggatgtagccgaagcggccgatgagcatggccaggccgatcatcaggttgtggaacggcgtgttggcaccgaaaccggcaaacgccgagccgttgttggcgctccccgaggtgtaggcgtagagcagttggctgaaaccgtgcgggccggggttggtcaccgccgaggccggtcccggcaggctggcggcgatggcgccgagcaccagcacgccgacaggcatcaccaggagggtgaagaccagcaggcggacctccttcgcctcgagcttcttgcccaggtactccggcgtccgcccgaccatcaggccggcgaggaacaccgcgatcaggacgaacagcagcatgccgtagaggccggcgccgacgccgccgaagatcacctcgccgagcatcatgttcagcagcggcagcatgccgcccagggggctcaggctgtcgtgcatggcgttcaccgagccgttcgaggcggcggtggtggtgatcgcccagagcatgctggcggcggtgccgaagcgactctccttgccctccatcggtgcgccctgctcgaccggcaactgcgccagcgccgggttcggctggtattcggcccacagcgacaagcccaggccgaggcagaacagcagcagcatgcagccgaggatcgcgcggctctggcgcaggtccttcacgtaatggccgaaggtgaataccagcgccgccgggatcaggatgatcgaggccacttcgaacaggttgctccaggcactcgggttctcgaacggatgagtcgagttgacgccgaagaagccgccgccgttggtgcccagttgcttgatggcgatctggctggccgccgggccgagcgggatggtctgctcggcgccttgcaaggtggtggcatggacgtagtcgaagaaggtctgcggcacgccctgccagaccagcagcaacgccagcagcaggcacagcggcagcagcacgtagagggtgccgcgggtcaggtcgacccagaagttgcccagctgtcgtgtggagcggcggctgatgccgcgcgccagggccaccagcacgcagaggccgaccgccgcgctgacgaagttctgcaccgtaaggccgaccatctggctgaagtagctcagcgaggcctcgccgctgtaggcctgccagttggtgttggtgacgaaactgaccgcggtgttgaacgccagggtccattccaggcccggcaggtgctgcgggttcagcggcaggctgccctgcagcatgaggatcgagaacagcaggaccaggccggccaggttgaatgccagcagcgccagggtgtaggtcttccagtcctgctcgctcgccggatcgacgccgaacaggcgatagcagacgcgctccagtggcgccagcggcgcgctgaggagattgcgttggccttccatcaccttgaagcagtagcgcccgaggaacggtgcaggcaccaggaccagggcgaaaaaggccaggatcaagagaatctcgtggctgttcatgtgccctcccctaggcacggtcggcgcgtagcagcgccaccagcaaatagacgaacagtcccgtggccagggccagggacaaccaatccagaacggtcatgtgtgcgatctctccttcgagcggcctctgccgcttgagggaaagtctccgcaaagggggcgtaaagaagcgattcagggccgcgtcggacggcataaagaaagcgtaaagagtggcgcggacagcgcctgggacagcaaccggccggggactgcgccacggccggtgacaaggcgaaggatcgacgctagccctgggcggcgcggatcatgttgcgggcgatcagcagttgctggatctgcgtggtgccctcgtagatgcggaacagccgcacgtcgcgatagaagcgctcgatcccgtagtcgccgatatagccggcgccgccgaagatctgcaccgcgcggtcggcgacgcggccgcacatttccgaggcgaacagcttggcgcaggacgcctcggtaccgacatcgcggccttcgtcgcgctgccgcgcggcgtcgatgaccatgcagcgcgccgcgtaggcttcggccttgctgtcggcaagcatcgcctggatcaactggaactcggcgatcggctggccgaactgcttgcgttccagggcatagcgcaacgcatcctcgagcatccgctcggcgacccccacacagactgcggcgatgtgcaggcggcccttgtcgagcaccttcatcgcggtcttgaagccgacgccctcgaccccgccgatcaactgactggcaggcacccggcagtcgtcgaagatcacgtcacaggtatgcgcgcccttctgtcccatcttgcgatccggcttgcccagggacagcccgggcgtaccgcgctcgacgacgaaagcggagattccgccggcgccacggatcgccgggtcggtgcgcgccatcacggtgtagatgccggcctgcggggcgttggtgatgaagcgcttggtaccgttgagcacgtagtgctcgccgtcacgcaccgccgtggtcttcagcgaggcggcgtcggaaccggagtccggttcggtgaggcagaacgaactgagcagttcgcccaacgccaggcgcggcaggtagcgccgcttctgttcttcggtgccgtcgatgacgatgccctgggagccgatgccgttgttggtgcccagcagcgaacggaacgctggcgaggtccgccccagctcgaaggcgatgctcacctcttcctccatggtcaccccgaggccgccgtaggcctccgggatcgacaggccgaacaggcccatctcgcgcatgcgggcgatgatcgcctcgggaatgcggtcggtttccgccacttcctgctcatgaggcaccaggctttcgcggacgaactggcggatgctgtccagcagcaggttcagggtttccggatcacgaatcatgctcactccaataggcccctaggccggttgccatgattccgtcaccggcctcggtcagcgggtggcggcctcgatgttgtggaccatgtgcagcaggcgcgggccgatgtcgtcctccagtttctcgcgcttgagatggaaactcggcccgccgcaattgaacgccagtagcccatggctctcatggtgcaaggccacgcccaccgcgttgacgtcgcgttgccactcgccgagcgacaggcagaagccgtagtcggcatagtcgcggaaggcccgctccagccccttgcgcacttccggccagtcttccgggtggcgcttgcggatgtgcccgaggatgaactcccgctcgtcctccggcatcgccgccaggcaggcccgaccgatcgcgctgcggtgcagcgagaggtggctgccgacctggcgacgcatggtcaggttggcctcgccatgcaccacgtcgaggtagaccatgctcagccggtcgcgggccgccatggccaccgcggccttggcgtagccggccatctcttccatcaaagggcgggcgagcgcgcgaatcgacaggttcgagagcatcgcgtagccgaacgacatcacgcccacttccaactggtacttgccgctatgcggcaggtgacgcagatagcccagccgggtcagggtgtgggtcagacgcgacaccgtcggcttcggcaggccggtcttcttcgccagttcctggttgcccagcaggctttcccgtggtgtgaaacagcgcagcaattccaacccgcgggccagcgctgtgacgaactggcggtccttgagttcctcgtctttctcctgcatcgggtcgatcagcacagcttcgaaggcggacacttccgcttccgtactggcaccttccgccggactccggcgctcgtcgttgccgcgcatagtagggacctctttttcaaaaaatcaataaaacaaaatcatatttcgcatagcgaaactaatagaagaacccatgcactttcaacaacgaaaataaaatccttttaaaacagtaaattgtataagtagatcgtccaaaatccgacgcgagtatttacaacgccccggctggcgctgattattttcgataaatcatgaaactatatttcgcatagcgaaatatcaattcatcggagcttccatgtccgccgatccttcgcccgtggtcctgctcgaatttcccgcagccgatatcgccctgcttcgcctcaatcgtccgcaagccaggaacgcgctgaacgacgaagtgcgccagcgcctcgccagccacttccagacgctcggcgcggatccggcgatccgcgtcatcgtgctcaccggcgactcgcgctgctttgcagctggcgccgatctccgcgatctctcgacgagcacggcgatcggcctgtacggccgccacagcgagcgctactgggaagccatcgcgcgctgcccgaagccggtgatcgccgcggtcaacggcttcgccctgggcggcggctgcgaactggcgatgcattgcgacctgatcgtcgccggcgagtcggcacagttcgcccagccggagatcaaggtcggggtgatgccgggtgccggcggcacccagcgcctggtacgggcggtgggcaagttccaggcgctgcgcatgctgttcaccggctgcctggtgaaggctccgcaagcgctggccatgggcctggtcagcgaagtggtggcggacgagtcgacgctggcgcgcgccctggaactggccacggagatcgcccgcctgccccctctggcgctggcgcagatcaaggaggtggtcctggccggtgccgacctgccgctggacagtgccctggccctggaacgcaaggcgttccagttgctgttcgactcgcaggaccagaaggaaggcatgcacgccttcctggagaaacgcccgccgaactaccaggggaaatagacgatgcccgatattcgttgtatcgccgtggtcggtaccggtgcgatgggcaccgggatcgcccagatcgccgcccaggccggcctgactgtgtggctgttcgacagccgcgccgaggccgccgccgaggcacgccagcgcctgcggcagaccttcgagagcctgtgcggcaaaggcaagctgagcgccgccgacgccgaggccgcgcaaaaccggctgcgggtggcggaacgcctggaacaactgggcgactgcgaactggtggtggaggccatcgtcgagcgcctggaggccaagcaggaattgctgcgccggctggaagccatagtcgcgccggagaccatcctcgccagcaatacctcgtcgttgtcgatcaccgccatcgccgccgcctgcgagcggccgcagcgggtcgccggctttcacttcttcaacccggtgccgctgatgcgcgtggtcgaggtggtcgacggcctggccagcgctccggaagtcggcgacgccctgctcgccctcgccgcgcgcctgggccaccgcggcgtacggaccaaggacagccccggcttcatcgtcaaccatgccggccgcgcctatggcaccgaggccctgcgcatcctcggcgaaggcgtcgccgaatgcgccgagatcgaccgtgtgctgcgcgagtgtgccggcttccgcatggggccgttcgaactgctcgatcttaccggcctcgacgtgtcgcacccggtaatggaatcgatctaccagcagtactaccaggaaccgcgctaccgcccgcacccgctgacccgccagttgctcgccgccggccgtctcgggcgcaagagcggccagggcttctatcgctacgtcgacggccagccgcaggacaagcccggtccgcaaccggtgccgcaggccgccatccggcccccggtgtggctgggctgcgaaaacgaggacgaccgccgcacgctcgccgaactgctgcatcgcctcggcgtcgagccggaaaccggcgaacgcccttccgccgcagcgctctgcctgctggccgcctggggcgaggacctgagcagcgccgtgcagcgcttcgcctgtcccgccgagcacagcgtcggcatcgacctgctctgcgacctcgagcgccggcgctgcctgatgctctcgccactgactaccccggccatgcgcgacgccgcccacgcgctactggctggcgacggcgtcggggtcacggtgctgcgcgacagtcccggcttcgtcgtccagcgggtactggcgatgatcgtcaacctcgcctgcgacatcgcccagcagggcattgccagcgtcgaggatatcgaccaggcggtgcacctcggcctcggctatccccacggcccgctggaatggggcgaccgcctcggcccgcggcgcctgctgagcattctccagcgcttgcagacgcttaccggtgacccgcgctaccggcccagtccctggctgcgccgacgagcgcaactgggcatgtccctgcgcgccggcgaaaccgccgccgtaggctgacgcatcggcgacctggcggcgcagcgtcatgcgtctcgccgccaggccaacgctttttccccgagcgacgctttccgggcttgcagctgccgatgtatcctgcgcgcaaattcatccgatgattggatgtttcttccgtgaccattcccctcaagcgctccctggtggacatcgccctggagcagatccgccagcgcatcgacgccggccattggccgctcggccagcgcctgccgccggagccggaactcgccgagctgctcggcatgagccgcaacaccgtgcgcgaagcggtgcgggtgctgaccttctccggcgtgctggaagtccgccagggcgacggcacctacgtgcgcgcctgcgccgatccgctggaaaccatgctggtgctggcgcgcagcgcggtgcagcactccctggaggcacgcgggatgatcgagatcgaggcggcgcgcctggcagccgttcgccgcgacgacagcgacctgagcgcattgcgcgaacatctcgacgcttcgcgccagcgctacggcagcgccgacctgcaggactacatagagcacgacgtccgcttccaccaacggatggtcgatgccgcccacaatccggtgctcagcgaactctaccgctatttctcgcaggtcatccggacctcgctggaacgcaccatggccgacccacaaagggcccagccctgcttcgagctgcaccagcaactgctcgacgccatagaacgcggagacccggacgctgccgccgcggccaaccgcgcactgctgatctgaacccgggacagacccatgactcacgccttgaatgcccggccgggagcgcaccccggccatcctccggaagaactgctgatcgatgccgaagtcgacgacgaaccagttccgccggcgccgccactacgcccctggctgctcctgctgggcctggtgctggtggcgttgaacctgcgcccggcgctgtccagcctcgcccccctgctcaaccaggtgcgcgacgataccggcctctcagccgctgccgccggcctgctgaccaccgcgccggtactctgcctggggttgttcgcgccgctcgcgccgcgcctggcccggcgtatcggcgccgagcgcagcgtgctgctgatcctcttctgcctggccggcggcatcgtcctgcgcagcctgttcccggtgttcggcctgttcgccggcagcgtcctggccggcgccagcatcggcatcatcggcgtgctcctgccgggcatcgtcaaacgcgacttcccgcgccaggccggggtgatgaccggggtctacaccatggccctgtgcctgggcgcagcgctcgccgccggcgctaccgcgccgctggagaagctcttcggcaactgggaactggcgctggcgttctggtcgctgccggcgatcctcgccgccgccttctggctgccgcagacccgccagggccagcacgcccatcgccaggccttccgtgtcatcggcctgtggcgcgacccgctggcctggcaggtcacgctgtacatgggcctgcaatcgtccctggcctacatcgtcttcggttggctgccgtcgatcctgatcgaccgcggcatgactgcggtagaagccggcctggtgctgtccggctcggtgatgctgcaactgatcaccgccctgctcgcgccctggctcgccgctcgcgccagggaccagcgcctggcggtggtgctggtgatggctaccaccctcgccggcctgctcggcttcctctatgcgccgctgcagaccatctggggctgggcggtcctgctcggcctcggccagggcggtaccttcagcatcgccctggcgctgatcgtcctgcgctcgcgcgacgcccacgtcgcctcgcatctgtcgggcatggcccagggcgtcggctacaccctggcggccatggggccgttcatggtcggcgtggtccacgacctgaccggcggctggaacgcggtcggctatatcttcatcggcgtcgccatcgccgccaccctgttcggcctcggcgccgggcgcagccagtacgtgggggcccgcagcgaacacctgtagccccgcagacgcaaaaagccccgcatcgcggggctttttctccttcgtcactcaggcatccgggccgcgcccttcggcgggcggcgtccgcggcgtgctggcgatccagtcgctgagcaggttgtaggccactgccagcaggatcgggccgaggaacaggcccatgaagccgaacgccagcaggccgccgaataccccgagcagcaccaccaccagcggcaggttgccgccacggctgatcaggtagggtttgaggatgttgtccaccccgctgatgatgaagaagccccacaggccgaggaacaccccgtggccatagtcgcccttgaagaacagccaggcggtggccggaccccagaccagcggcgggaccatcagtaggctgcaggcgaaggtcagcaggccgagcagcatggctcccggtacgccggcgatcatgaagccgatccaggccagcagggcttgcgccgcggcggtaccgatcaccccgttgaccacccgctgtacggtgccggcgacaaggtcgcgatagtgctccgcgcggttgccgatcaggcgttccagggcacggtggacgatggactccaggcgcggcccgtcgcggtagaagaagaagatcaggatcaggctgaggaccagttcaaggatccctccgccgatcttcgcgctgcgcgccagcagccagcagccagttgccgacctcgccgacatagggcttgagcacgtagaagaacgccacgccctgttggtcgatggagtcccaccagccgatcaggcggtcgccgatcagcggtacgccggccatccacgaaggcggcggcggcaggccctcgacctggagattcttcagcagctccatcagcgagcgaacgttgtccgccaggccgaaaccgagccagatcagcggcaatgccaccaggacgatccagcccagggtcagcaggcccgccgccagcgactcgcggccaccgagcaggcgcgtgagcatgcgcatcagcggccaactggcgaaagccagcaccgcggcccagaacagcgccgaccagaatggcgccagcacccagagactggcaccgagcagaccgaacagcagcacgcgaagcaacagccgatcgttatcgaacatcaaggcaggccttcctcaaagggggatacaccgatagacagcgctcggcgtgcgccgtttccagccggagcgtggggcgcgggggaaaggcagtctactctggcgggcggccttgccgaaggcattttcgccatcgcccgggcccgcaggcccgggcgaacgcgttcaacgcagccagttgaggtgcaggccctcgacctccgactggcccagctccatgcggctgttcagcacgccctgcccgcgcagggcgtcgcgccactcctgggcgtgcttgccggacagctcgacccgcaccccggtatccaggcgcagggtccgcaccagcagctccaaccaggagccggccggctccgccggcacatggctgagggtcagttcgccgttggccttgagcaggcgcagcagggtcgccgggctcggcagcagttccgccagcggcgcatcggccttgagttcctcggcctgcaggtaggcgcggcgattgccacgggtgatcgagtagaccgccaccaggctgttctcctgcggcgccgccagacgcaccagcaggtaggcctgctgctcgtccgggccgtacagcttggcattgccgaacacggcgttggccagcaggctgctggagccgcagtcgcgtcgctcgcaccagaacaacggcgtggcgtcggccttgagcagcgcggtgcgcgccgcggcgaacgcctcctggctgctgtgctcgggcggcaagcggtaggtcagtgcggtcagctcgccttcggcgcgcacctcgccctccatgcgcaggcgaccgctgatgcgactgatcgcccctagcgggtagatccgttcctcactcggcgcctgacggaagtcgacgatctcggcgcgcgggaagcgcggcaggatgtccaggtcatggctgccgggaaggtcggcggccagcgccgaaaagctgaaaacgcccagggatagcaacaggaaccctcgcataccggccctcaacgggtcagcatcgactgggcggtacggatggcggtcgccctccttctcccgccgcggcaccagcagtccgcgctgcaccgcgggacgcgcctcgatggcggcgatccagcgctgcaggttgtccagcccgtcgacggcgacaccggaccagtcgtggatgcgcacccagggataggtggcgatatcggcaatgctgtagtcgccggcgaggtactcggcctcgcccaggcgaccgtcgagaacttcgtagaggcgccgggtctcatgctggtagcggtcgatggcgccctgcaacttctccgggaaataacggaagaacacgttggcctgcccctgcatcgggccgaccccgcccatctggaacatcagccactggatcacccgcgagcggcccttgacgtcggtgggcatcagttgcccggtcttctcggcgaggtagatgaggatcgcgcccgactcgaagacggcgaagtcgtcgttgtcgcggtcgacgatggccgggatgcggccgttgggattgatcctgaggaattccggagccttctgctccttcttgtcgaacgacagcgcgtgcaccctgtagggcaggcccatttcctcgagggcgatggaaaccttgtggccgttcggcgtggcggcggtgtagagatcgatcatgcggtgactctccgtaacgatccgtccagccttacggctggacccggaatagtcaaggaaacaacggcaagccggtgtttcagcgcgcgaagaaggccgcgaagaccctggccaccgcctgcgccccggcctcatcgtccagatgcaggtgatgcccgcccggcaggtggtgccgctcgaacggcagggtctccagcagcgcccgcatgcgcggctccaccgccagcatgccctgttcggccagcaccaggctgaccgggcattccacgctgcgcacgaagttcagcgcgtgggcctgggtcaggcgcagcggcgacggtagggtcaggcgcgcgtcggtgcgccaggtatagccaccgggcaccggttccaggccgcgctgggcgagtagttcggcggcctcccgggagatctcgccaaccccgcgcatccgcgcttccacggctttttccagctcggcatagaccggcttgcgcttgtggcgtagcgccagttgcgccttcagcgcttcgccgagcttctgcggcgccttgtcggcttcgccagtgtagggaatcaggccatcgatcaacgccagccgctcgatgcgctcgggcaaggccccggcgagcagcaccgagacgatggcgcccatcgagtgccccaacagggaaaaccgctcccagcccagttgctcggccaccatcagcacgtccagcgcgtagtcccagagcaggtagctggcgccctcggcacgatgcgcggaatgcccgtggccggcgaagtcgagggcgacgatacgcagcccggcgagcttcggcgccaggcgcgagaagctcatggcgttgtccagccagccatgcagggcgatcaccggcttgccgtccggcggaccgaacagatgcgcggccagttcgatgtgcggcaggctgatgcgtacttcctcgacctgcaggctcatgccgaacgctcctcggtcgcccgcgaccagcgatcgaacacgcctttcagcagttcggcggtttcccgcgggcgctccagcgggaacatgtggccgccgggcagcgacatgaactcgccgcgcggcatcgcccggatcagccgggtgtggtgcggcaacaccaccttgctgtgccgcccgcgcaccatcgccagcggcacctgcaactgtcgtggacgccccggactgctgtgcggcacgctacggtagatgctgatctcggtggccggatcgaagcgcaggcgcaggccggaaccgccgccgctgtcggccagcccgtggcgtacgtaggcctccaggcaatcggggtcgaagcggcggaacagcgccttgccggagaagtacgcccgcgcctcttccaggtcggggaacgcctcgcgacgccccagggtgcgcccggccggagtgatccggtcgatgaagccgaagcgcttggcggcacggatcaccaggcggtcggcgagggtcagcaccggcgaatcgagcatcaccacgccgcggtagagttccggccggcgcagcgccgcgtggtagtgcagcacgccgccgagggaatggccgacgccccagaccggctgttccaggctggcgaggtggtgcagcagttcgtccaccaggttgtcccagttgtcgttcaccgggaaacgcgggtcgtgcccgtgcatttccaggtgatccacccggtactccggcgccaacgcctcgaacagcttggcgtaggtagccgacgggaagccgttggcgtgggcgaagaaaaccgattgcgacatgcgcgacgtctcgacagggctgatgccagggattctccggcagcctcgccgaggcggcaatggctttgccggctgccttgcacggcgaagcggccaaaacctcaggcagagcggacgagatgctcgaggatcgccgccgccaccagcaggaacaccaccccgcaggccgcgtccagccagggcaccgcgcgcaacaggcgggtctgcagggccgggcgggtaagggtcaggctgagcaggccgaaccagcaggcgcccatgccgaacagcagcgccgccaccgccagcttgccgccgagcgacatctgcgcgggaatcaggctgccgagcaaggcgatgaagaacaccagcgccttgggattgaacagattggtcgccactccgcgcagccagggccccaggggcgacggcggcagtgccccgtcgagccggcccggctggccgtcgccgcgccgcagccaggcgcgcagcgcgccgacgccgagccaggccaggtacagcgcgccgagcgcctgcaggatggcgaacagcacaggcgtacggctgagcagcagcgacacgccggtcagcaccagggtggtatgcaggagaatcccgcaggccagccccagcgcgctggccaggccggcccgccgcccctggtgcagggacgtgcgcaccaccagggcgacatcgggaccggggctgaccagggctatggcgaacaccgccgccagggtcagcaagacagacaattcctgcatggctactccacgaaaaagggatcggaaaggaaaacgcgaatcagcgctggcgcaggcgcgccggcggtaacccataggtgcgccggaacagacggctgaagtgcgcctggtcgtagaaaccgaactgctgggccacctggctcaatggctgctcgccgcgcagaaccagcggcaaggcgcgctccaggcgcagttgggtcagccactggtggggcggcaggccgcagtgacggcggaagcgccgcagcacctgccaggggctcaggccgcagaaggcggccagttcctccaggttcggcgggtactccaggcgcgactccagccagtcgcgcagccgcgtccagtcgcgctggccgaagccttcccggtcgccctcctccaggcgcaggctgctgcccaggctgagcaggcaggccagcgcctgccagaggtgctcttccagggccagacggttctccagcgccgccgctccgccgagcatgcccaggtgcaactgacgcaggcgctgctgcagacgctcgtcgcggaccaggctgctggtcaggcgcggcgccccccggcggccgtcgctgaagtcacggctggcgcgctccagccagtcggcatcgagcgccaggacgcggatacggtagccctcctcgccggcgctgctgccgtcgtggatgctttccggcgccatcagcaacgcgtcgccggccccggccaggcgccgttcgccgccggcggcatagcgatgccggccctgcaacagcaagccgatgtggtactccaggtggaagtgccggggaaaggaaaagcggttgtgctcggcgtctatcaggcgtacgccgggaatcccgctgctgagatgggtgatctgttccatcccgctactctaccgcccgcgggacggaacgatcttggacaaaattgcggaccgcgctcagcccgccctgcccgccaatggcaccaccgccatggtcaggcgggcgatgcagctcggcttgccgtcgtcgccactgaggcggatgtcccagacatgggtggtgcgccccaggtggatcgccctggccaccgcggtgacccggccgctgcgcaggccacgcaggtggttggcgttcacttccaggccgacgcagtagtactggctggtatcgacgcacaggtagctggccatcgagcccaggctttccgcgaggaccaccgaggcgccgccatgcagcaggccgaacggctggtgggtacgcgagtcgaccggcatgctcgcggtcagcgactcgtcgtcgaaggcttcgaagcggatgccaagcaggtcgccgatgctgttcttctgcgaggcgttcagttgctccaggtcgggcgtttgtcgccagaggctcatgggaattccttgcgcaagggggaagccaagggcttcccgtcggtgggagtcattcgtgccagagcacggcctcgcggcgttccacccattcgtggaagcgcgagccataggcaccttccaccatattgcgcttgatcttcaaggtcggcgtgaggaaaccgttgtccaccgcccaggtttcctgcaccaggaccaggccgaccaggcgctcgtgcttgtcaagcgcaccgttgacctgttccaggtgcgcccgcaggctgctttccagcgccccgcgggtcccgttgagggcctcccggcgaccgacctcggagagcacgcagagccccaacggcgcgctgaggccctcgccgaccacgcagacctgctcgatgcgatcgtgtaccgccaggcggttctcgatcggcgccggcgccacgtacttgcccttgctggtcttgaagatttccttcatccgcccggtcaggcgcaggttgccttcggcgtcctgctcgcccttgtcgccggtgcgcaggaaaccgtcggcggtgagcacctctgcggtcttctccggctccttgtagtagccgaccatggtcgcgccgctacgcacctgcacctcgccctcgtcgctgatgcgtacctcgacgccggggctgttctggccgatccagccggtcttctgcctgccgggccggcagacgtgggagtaaccgctgttctcggtcatcccgtagacctcgagcacatccaggcccaggcggcgataccagagcagcagcgcctcgggtaccggcgccgcgccgcagagcgcgtagcgcaccgcgtccaggcctagcccggcgagcaccttgcgaccgacgatgcggccgaggatcggcagcttcagcaggcggtcgagcttctgcgccggcatcttcgaatacacccccatctggaacttggtccagatgcgcggcacgccgaacagcagggtcggccgcgcacgcttcatgtcctcgacgaaggtgtccaggctttcggcgaagaacaccgtggttcccccgtagagcgaccccatctcgacgaacatccgctccgccacgtggcacagcggcaggtaggagagcatccggtcgtcttcgcgggtgccgaacagttccacgccgcggctggcggcgaaggcgaaactgctgaagttgtgcatcacccccttgggcacgccggtggttccggaggtgtagatcagggtggcgagttgctcggcagcggtcggcgtgtcgccttcgagcggcgcgcaggcctgcaggtcgctccactggcggtcgaaacgcccttccgggtgcaacggcatggccacggtcggtatgccctcggggactccgggcgccatcgccggccagtcgtcgagcttgccgacgaagaccaccgccgactcggaatgctccagcacctggcgcgccgactcggcggtgagattgggatagagggggacggaaacgtgcccggccatccagatcgccaggtcaatgacgatccagtgcgcacagttcttcgagatgatcgcgatacggctgccggcggggagatccaggctgcgcaaccaggcggctgcacgccgcgcctggtcgcccacctcgccccagctcagctcctcgacccggccgccaccgatgggctgcaccaggtaacgccgttgcggatgacgcttttcgcgctcgaagaagacttcgagcggcagacgatttgcagtgaccacgtaccgcctccgttgttgttgttctgggagatcgaccaagcacttgcttggtcgaatattccatcacagccaaccgcaggcaagccgggaaatgtttcggtttgtagtcgttgtgccaggcgcttcctagccgtgccgcgggtgatgcagcgagaccagggtcatcagcccggcggcggcgaagtcgccttccagctcggccagcgaggcagtgctcatcggcaatggatcgcgccggttgccatgcaccagcagaccgcccagcgccccgaccaggggctggtggctgaccagcaggagattgcgctcgctgcgctcgtcgaggaaaccgagcacctcgcgcggatcgtcgtcgggggtcaaccagggcgcggtgccgaccggctcgaccaggcccagtgcctcgcgcaccagctcggcggtctgctgggcgcgcacgtaggggctggcgagaatcccgtccagcggcaacccggccagccgcgcggcgctctgcagcacctccttgcgtccatgggcggtcaggcgccgctcggaatcccggctggcgtgcggttcggcctcgccgtggcgcaacagccagagtttcacaacttcggctcttcgtcgcgcgccgggtgcgcggcgggcggcacgctgtgggcggcctcgccctcggcggcgcgggcgctcggccagtcggcgaacggccagggtttctcgtcgctgtggaaggtaccgaaacggccgatctgcgccaggtactggctgaggctgtcgccgaaagccatcaggctgccgttcggcgcgccgtagatcagtcggtagaccagttggatcaccaccaccgccccgaggagcagttcggcgacctgccagaccaggacgaacagcagcatccagaggatgcggatggcgatcgattcgcgtgcttgcgggtctgcggacatggcggtctcctcgtcagaagccggtggtgggaatgaaatcgacgtcggtcttcggctcgccgcgcatcagcagctggatgacctgcgccagggtgcggccttcgaagaggatcgcatggagaccggcgaccagcggcatgtacacctgcatctcgtcggacttttccttgagtaccttgagagtgttcacaccctccgcggtctcgcccatgcgcgataccgcctcctccaggctgagcccctcgccgagggcgtggccgacctggtagttgcggctcttcggcgaggaacaggtgacgatcaggtcgccgacgccggcgaggccgagaaaggtcatcgggttggcaccgagcttgacggcgaaccgggtcatttccgccagcgcgcgggtaatcagcatgctgcgggtgttctcgcccatatccatcgccgcggccaggccggccatgatcgcgtagacgttcttcagcgcaccgccgagttccactccgaagcggtcgcggctggcgtagacgcggaaggtgcggccgtgcagggccgcctggacgcgggcgcacagctcgtcgtcctcgctggcgaccaccgtggcggtcagctcgtgctctgcgatctcgcgcgccaggttcgggccggaaatcaccccgatgcgggcttgcggggcgatttcctcgaggatctcactcatcagcttgaaggtgtgcgcctcgatgcccttggtcaggctcaccagcagcttgtccgtcaatgccgcctggtgtggttgcagcaccttgcgcagggcgctggagggcaaggcgacgaagatcagttggcaatcggccagggtgcgctccaggtcggtgaccggctcgaccccgggatgcaccttgacccctttcaggtagcgcgggttctcgcgtcggctgcggatcgcctcggcctgctccgggtcgcgcatccactggcggaccgcctggccgttctcggccagcaggttggcgatggcggtgccgaaactgccgccgccgagcacggcaatcggttgctgctctgtcatgattcatccatttctggccgccacgcggcaatcacgccattatacggtcggccagccggccgaccagtcttgacgccggcgctggcaaaagcccgcgcctcgtttaccatgcccgggccagacaatacctatcgagaacaaggtcgttccgtgcccatcgcttcacgtgctcccgcctccctgaccctgctggccctgctgttcggcggcaagctcgcggccgccgacctgttcaacgatcccagcggcgttcccgaagtattgaccgcgacacgcctgaaacaatccccggcggaagttcccggcagcatcagcgtgctcgaccgcgagctgatcgtcgccagcggcgcccgcgacattcccgaactgatgcgcctggtcccgggcatgatggtcggctacctgtccggcaaccagcccacggtcaactaccacggcaccagcatgtcgggggcgcggcgcctgcaggtgctgatcgacggccgctcggtgtaccgcccgggccttgccagcgtcgactggagcgacctgccgctggccctcgaggatgtcgagcggatcgaagtgttccgtgggccgaataccgtcagctacggcgccaacgcattgatgggggtgatcaacatcatcacccgcgcccccggcgagtcgcccggcacgcgcctgaagtacacggcgggccagcgcggcatccgcgactggtacgccagccagagcatcgccctggaagacagcgacttccgcctgtcgctgtccggccaggaagacgacggcttcgaccgcgaccacgacggtcacgccctgcgcgacggccgccggctcagccgcttcaacctcaacgccagccacagcctggcgccgaaccagagcctggagtggcaactggcggccaaggaaggctcgaaccagcacccctacgcctaccgctcgccgtttccccaggttcccgacgacatcgacaactccgatacgctcgcccacgactatgccggttcgctgcgctggaatgtcgacctcgacccgcgccacagcttctatatacaaggctacgcacagcactgggagcgccggcaggaatggaacgcctgcgaggcggccattgccttcagcccgcaactggcgcagctctgggaactgaacccggactacctgcgcaggttcgccgacgatccgacccggctgccgcccggcagcgcccaggagttgcaactggcgacccaggtcctcgaccagctacgcaatggcggactgcgtccggtctgcggacgggtcgaccgcaacatccgggaaagccgctacgacctggagatgcaggacaccctcagcctgggcgacaacctgcgcctgctgaacggcctgagctaccgctacgaccaggcaaactccgagaccttctacggcggcagggtcagcagccagatctggcggctgttcagccaattggagtggcatgccggcgaacactggctgctgcagggcggggggatgctcgaagacgtcgagggctccggcagttcgttcagcccgcggctggcggtgaactacctgttcaacccccagcacagcctgcgcgcggtctattcggaggcagtgcggtcaccgggcatgtacgaaaacgacgtcgactggcgctaccgggtccgccacctgacaccgacgccctatgggcagagcgaagcctactacttcgccagcgcccacggccccggcgacctgggcaaggaacacacccgttcgcgcgagatcggctacaacggttttttccgcgagaccggactggccgtggatgtacgcctgttccacgaggaaatcaccggactgatcagcgatccgctcagcgtcgtcgacttcagtccggacaacggcgatcgcatccgcttctccggcgcggaaggccagctcgactggcgcctgggcctacgcgaccgcctgcgcgccacctacgcctatctcgactacgacgccaccagtcgctacgaccggcgcctgaccgcccgccacggcggctcggccggctggatgcacgactggggccaaggctggtccagcgccctcttctattatggcgacgactcgctcaatggacatcgtttcgaacgcgtcgacctgcgcctggccaagcgcattcccctgggcaaggccgccctggaactggccggcgtgctccagcagcgtctcgacgacgaaccgctgacgtttcccgacaaccgctacgacagccgccacctgctctacttcagcgccgaggtgacgttctagatgcgtcgcttgcgccccgcccgccgggctttccaggcgctgctcgcgctcgtcttctgctgtctcccgcatgtcggcgaggccgcgcaactggtcctggtcagcgccaaccagggggccgcggtgaacgcctttcgcgatgccctggcgcagcgacggccgcaggaccaggtggaactgcgcacgcccgcggccctggcggaggggatggtcttcgccgacgacacccgcctgctcctgctcggccccgaggccctggcctggcgcctgcgccagcaccgggcgccgccgaccctggcgctgctgctcaaccgggtcgatggccagcgcctgctgccaggcgccaacggacatggcggacacggcgtcggaggtctctgcgtactctggagcgacccgccggcgtcccgccagctccgcctggcgcgcctgatcctgccgggcatccagcgcatcggcgtgctctacggcaaggacagcgaattcctcctcgacgagcttcgccgcgaggcccgcagccaggggctccagctgttcgtcgccagcagcagcggcaacgacgacccgcgcccgctgcagttcctgctcggcaatagtgacctgctgctcggcatcgacgacaaacagctgtacaactcgcagagcatcaagagcctgctgctcggaagctacgccaagaaccgcgcgctgctcggccccaccgcagccttcgtcaaggccggcagcctggcgagcagctacagcgaccaggaggattggctggacaccctcgacgaattgctcggccaggcgcccaggcactggcccctcagcctctatccagggcatttcaaggtgctcggcaatcggcaggtagcccgttccctgggtatcgacctggccagcgacgccgacctcggccggcgcctcgccgaaggagaagaaccatgagccagcgccacggctgggacatccgtacccgcatgctggcgatcagcctgggcccggcgctgctgctgaccctgttgctcaccgcctacttcacctactcgcgcctgcaggacctgcgccaggaactgacccataccggccagttgatcgccgaccagttggcgccggccgccgaatacggcgtgatcgccggcaacacgcccgtgctgcagaagctgctgcaggccaccctcgacaccccgcatgtgcgcttcatcgaggtacgcgaccgcaacgacaatatcctggtgtacgtcgaacagttgcccggcgcgttgcagaacgccgcgccgatcgacatcttccactccaccatccagcgccagcgtatcgccctggccagcgacccgctgctggatggcgccagcgaaggcgacggccagtccggcgaggactacctcggccgggtggtggtcggcatgtccaacgacgccttcagccagcggcaacaggaaatcctcctgaaggccgccctgctggccgccttcgccctgatcctcaccttcctcgtcgcgcgccgcctggcgcagcgcctgtcggcgccgatcagtaccatgggccaggcggtcgaggcgatccagagcggcgactacaagaccagcctgccgatcctcgacgacggcgagatcggcgacctggcccgtcacatcaacaatctcgccagcgggctggaccgcgcgagccgggaacaggaacaggcgatcagccaattgatcagcgcccgcgaggaagcggagcaggcgaaccgggcgaagtccgacttcctggcgatgatgagccacgagcttcgcaccccgatgaatggcgtgctgggcatgctgcaactgctggaaaccaccgagcagacccgcgaacaggccgaatacacggcgctggccaccgagtccaccgaacacctgctgaaggtcatcaacgacattctcgatttctcaaggatcgaacgcggcgcgctggaactggagtgcatccccttcaacctgctggaactggtgcaaggctccgccctggtgttccagcacagcgcccagcaacgcggactggcgctggaattgcagatccaggccggcctggagaatatcgaggtctgcggcgatccgacgcggatccgacagatcctggtgaatctgctgggtaatgcgctgaagttcaccgaggaaggcgccatccatctcagcctggagtggcaggctctcgatcacgacgtactgtggctgacctgcgcggtgcacgacagcggcatcggcatctcgccggaacgcctggaacatatgttcgacgccttccagcaggcggattcgtcgatttcccgacgctacggcggcaccgggctcggcctggcgatcgccaggaccctggcggaacggatgggcggcaccctgcaggcagagagcaaggaaggctcgggatcgaccttcaccctggagattccgctgcccttccagcagtcgccggcgcaccggcagcaggccgccggcgacgccgccccggtcgccgccggtcaggaaatcctcctggtcgaggacaatccggtgaaccagacagtcatagaagccatgttgcgcagcctcggctatcgcgtcaccctggtcgccgacggtatccaggcggtacgcagcgccgagcgccagcgctacgacgcgatcctgatggactgccgcctgccggtgctcgacggctactcggcgacacgggaaatcagggcccaggagaacggccggcaggtaccgatcatcgccctgaccgccaacgccctgcagggcgatcgggagaactgcctgcaggcgggaatgaacgattacctggccaagccattcaaacgggcggaattgcaacgcatactgcaacgctggatcggctcgcagccggaactccctgtgacatcgaacgaaaccggacgaggggagccggaatgatctacgacaagggcggcaagcggacgcgggaataaagtgaacatctgttcgccggacactgtgactttcaccgcaacgcaacagtctatgactaggctgccgctgcgacgccgatacaataacccggcgcgacggccgctggacgaaccgccacaaccctgcagttcagggatttttgaggagctcgcatgaccaaacaacacgccttcacccgagaagacctgctgcgctgcagtcgcggcgagctgttcggcccgggtaacgcgcaacttcccgcccccaacatgctgatgatcgatcgcatcgttcacatcagcgatgtcggcggcaagtatggcaagggcgagctggtcgccgagctggatatcaacccggacctgtggttcttcgcctgtcacttcgaaggcgatccggtcatgcccggttgcctgggcctggatgccatgtggcagctggtcggtttctacctcggctggcagggcaaccccggccgcggccgcgccctgggttcgggcgaagtgaagttcttcggtcaggttctgccgacagcgaagaaggtcacgtataacattcatatcaagcgcacgatcaatcgttcgctggtcctggccatcgccgacggcaccgtcagcgtcgatggccgcgaaatctacagtgccgaaggcctccgcgtcggcctgttcacctccactgacagcttctaagggttatccgcatgcgtcgcgtcgttatcaccggtctgggcatcgtttcctgcctcggcaatgacaaagacaccgtttccgccaacctccgtgcgggtcggcccggcattcgcttcaatccgtcctacgccgagatgggcctgcgcagccacgtttccggttcggtcgacctgaacctcgaagagctgatcgatcgcaaggtcttccgcttcatgggcgatgccgccgcctacgcctacctggcgatggagcaggcgatcaaggactccggcctgactccggaacagatttccaacccccgcaccggcctgatcgccggctccggcggcgcttccaccctgaaccagatggaagccatcgacaccctgcgcgagaaaggcgtcaagcgcatcggcccataccgcgtgacccgcaccatgggcagcaccgtatcggcctgcctggccacgccgttccagatcaagggcgtcaactactcgatctcctccgcctgcgccaccagcgcgcattgcatcggccaggccatggaacagatccagttgggcaagcaggacgtggtcttcgccggcggcggcgaagaggaacactggagccagagctgcctgttcgacgccatgggcgccctctccacccagtacaacgagacgccggaaaaggcctcccgcgcctacgacgccaagcgtgacggcttcgtcatcgccggcggcggcggcatggtggtggtcgaggagctggagcatgcgctcaagcgcggcgccaagatctacgccgagatcgtcggctacggcgccacctccgacggctacgacatggtcgccccgagcggcgaaggcgcgatccgctgcatgcagcaggcgctggccaccgtcgacgcgccgatcgactacctgaacacccacggcacctccaccccggtcggcgacgtcgccgagatccgaggcgtgcgcgaagtgttcggcgacaaggcgccggccatcagctcgacgaagagcctgtccggccactcgctgggcgccgccggcgtacacgaggcgatctattgcctgctgatgatggaaggcggcttcatcgccggctccgccaacatcgacgaactcgacccggaagtggccgacctgccgattctccgcgagacccgcgagaacgccaagctcgataccgtcatgagcaacagcttcggcttcggcggcaccaacgccaccctggtcctcaagcgctggcagggttgattccctccatcgccgcatgaagcgcccttcggggcgcttttttgtacccagcgtttctttacccgaactgcatgaacgggctaaacctggcgccccgcctgccgatagaactgatcagccccgtctctctcctgccccctggaatccgccatcatgtctttgcgcagtatgcccatcgcgacccgtgccgccctgagtttcgccctgatcaccgctctgctggtcatcaccggcatcttttccctgaaccgaatgggttcgctcaacgaagcctcttcggacatcagcgacaactggctgcctagcgtccgcgaaagcgccgagttgaacgttctgctcgccgaactgcggcaggtgcaactggcccatgtgctggcggcggacgacagcagcaaacgcttcctggaaagccgcatgacggaaatcggcaaggaactgaccgatcgcgagggcgcctaccaacggctgatcagtggtgccgacgagcgctcgatctacgagcgctacctggctacccggcagacgctcctgcaaagccagcagaccctggtgcagatgtcgcgcagcaagccgctggaagagacccgccagtacaccgaaagcaccttgctcgaccagtaccgcgccacccagcagcaactgcaggcgctgatcgacttcaacgtcaagggcgccagccaggccagccacacggccgatgaggtctatgacagcgccttcgccgcagtgatcggcgtactgctggtcgccggcctcgctaccgtggtactggcctggctgttcacccgcagcatcacccaaccgatcggcgaggcgctgcgagtggccgaggtgatcgcttccggcgacctcaccagccgcatcgacacctctggccgcgacgaaccggccaagctgctggtcgccctccagggcatgcaggcacaactgcgccagaccatccagcagatcggcagctcggcgacccaactggcctccgccgcggaggaactcagcgccgtcaccgagcagggcaaccgctcgctgacccagcagaacgacgaaatccagatggccgccaccgcggtcaacgagatgaccgccgccgtcgaggaagtggcgcgcaacgccagctccacctcggacgcctcgtccgcctccgagcaatcggcgcagaacggacgccagcgggtactggagacggtccaggcgatccgcctgatgagcgaagaagtggacaatacctcggcgctggtcggcggcctggcggaaaaggcccaggacatttccaaggtcctcgacgtgatccgcggtatcgccgaacagaccaatctcctggcgctcaacgcggccatcgaggcggctcgcgccggcgagcagggccgcggtttcgccgtggtcgccgacgaggttcgcgccctcgcccatcgcacccaggaatccacccgcgagatcgagcagatgatcgccaacatccaggaaggcaccggcgccgcggtcggcgccatggacagcagcagcgtacgcgcccgcaacatgctggagatcgccgaagccgccggcctggcgctcaacgagatcgcggagcgggtcggccagatcaacgagcgtaccctggtgatcgccagcgcctccgagcagcaggcccaggtggcccgcgaggtcgaccgcaacctggtgaacatccgcgacatctcgctgcagacgtccgccggctccaaccagaccgccgccgccagccaggaactgtcgcaactggccatcgacctgaacaacatggtcacccgcttcgtcgtctgaccatgccgtgcgccgtctcacggcggcgcttcctccggttgcccagcgtgaagcccgggttttaccatgaaacccgatcctctccccctccggagccgcccagatggtcaagcgcaccagccacaagcaagccagttgtccagtcgcccgcccgctggacgtgatcggcgacggctggtcgatgctcatcgtgcgcgatgccttcgaaggactgacgcgcttcggcgaattccagaagagcctcggcctggccaagaacatcctggcggcgcgcctgcgcaacctggtggagcacggcgtgatggtggcggtcccggccgaaagcggcagtcaccaggaataccgcctgactgacaagggacgcgcgctcttccccctgctggtggcgattcggcagtggggcgaggactatttcttcgccccggacgaatcccatgtccgcctggtcgagcgcgacagcggccagccggtgccgcgcctgcaggtacgcgccggcgacggcagtccgctcgccgcggaagatacccgggtcagcagggactgatcgaaggacgaacaggctaccatcggcatccgcgcgtacgccgccaaaacggcggataaccgcgggcggttattcgccctgccgcacgcaggcaacccttgcccggtagagcgaatggcgcccccgcgttatccacgcgacacaagaaaaccagcgctttgcatggctcgcgctcagcgcacgtcgaaggatttctccgccagcaggcgatcgccctggaacaccatcaaccgccattcgcccttcaccacttcgtgcggctcggtgaattcgtaggccatgacatcggtcggcgcgcccggcaccagcttctgcaccacttcgaacttgtcatgccgctggccatccggagtgaccacgcccggggtgaggtagagcagcgtcaaaggcgtatcgccttcctgcttgccgctgagttgataacgcatgccgaacttggtgccgagcttggccgggacttcggtggtctgctggatgttctgctcgctacgggtcaatacccgttcgccgggctggaaatcctggtagcggctttcgaacacgccatattcgatggggccgtcgatacgcacctcggcctgcgccgccacggcgacgccggcgccgagcaggaagacggaacgactgatgcaagaacggatgaaggacatgactcactcctggatgggactggcgcgagcctatgacgccggcatgacagactgatgacgaatccgggttattcgcctcgcggatcggcgggctggcgcggcagcactgcgaggaagttgtcccgcgccacctggcgagcgacctgctcgggcaaggcgtcgaggaacggatcgaagctcgccatcaactcgggcaggctgtcgaactggccgaccacatcggaaccgagcatgaagcgttgcggaaaccgctcgaccagtgccagccactgcgggtcgggcttgccctgctcgtccagcaggtacgggcgcaacaccgaccaggacaggtcgatgtagaggttcgggtagcgctgcagcagacgcccaagggtcggcaggaggaagtccagtttcttctggtggcgatggatctccatgctggtcccggcatgggcccagatgaaccgcacatgcgggtgattgcgcaggggctcctcgatttccgccaggtacagcgggttgcgttcgcgcttggaagtgacgttggcgtgcagcaacaccggcaggtcgaattcggcggccaggtgatagacccgcgccagcgcctcattgttggccctcggcacgtcgccgtaggtcagcgcggtgaggtcgtcgtgccgggtaaagatctcgccgatgccctgccagagtcccgggtccagctccagcatgcgacggatgtgcgcgtcggcgttcttgtcggtcgggttgaaaccggtcaggaacggatgcacgcgccgccgctgctcggctggcagggatttcaccgccgccgccacgatcacgtcggtggcgctgtaccaataggctccggcatcgtcgccagcgtagtagcgcggccgcttcggctcgtcctcgtgccatttcttggcgaccgcgacgccgctgagcatcacatggtcgacccggcctttgtccatcgcctccagcaggcgcggcatgccttcgctttcctggaagaaatccacgtagtgcacgtgagcgtcgctgtagcgataatccctggcatgggtcaaggatgtcaccagagacaggacgaacaatgtcgaaaacagggcacgcgtacgggggccagccatggcattcctcctgataggcctgagtgaacatagaccgctgccgctcggccagggttcgccactacgctggctggccctgttgctcggcctgctgacctggcatgccggggctggcgaacggctgatctatccgcgccattccgaagggcgcaaccccgaaccctacgtcgtcgagctgctgcaactggcgctggccaggagcggcggcgactaccgcctggagcccagcgcgcagcccatgccgcagtcccgtgcgcaactgcgcctggagcaggacgatccgggcctgcaggtgatgtgggcgcagtcccgcgacgacctggaagagaccctgctgccgatccgcattccgatctatcgcggcctgatcggctggcgcattcccctggtcagcgccgccaacaaggatctcctggcctcggcgcggaccctcgacgatctccgccgcctgcgcttcggccagcgccaggactgggccgacacaccgatcctgcgcgccaacggcctggaggtgaagaccagccagaactacgagagcctgttccgcatgctcgatgccggccgcttcgaggtcttcccccgcgaggtcgtagtgatcgacggagaactggaggacgcctcccgcgccgggctgcacctggcgatcgaccagcacgtggccctgcactaccccgcggccttctatttcttcgtttcgcgtcaacgcccggaactggccgaggccattcgccagggcctggagaaggcgattgccgacggtagcttcgaacggctgttcgagcgacatttcaagacgcggctgggcaagcttgcccttcggcagcggagaataatcgagctgaaaaacccctatcttccaggaaaaactccttttcagcgcgaggcgctctggtaccggccgtgagctagaatgaatccctcacgccaccaccgatgtccagcatgtcccgtaacgccccgtaccgcctcgacgaccagatcggcttcatcctgcgccaagccaaccagcgctatgcggcgttgttcgccaatggcatcggcaacggcctgacccccacccagtgggccgccctggtccgcctcggcgagaccggaccctgcccgcagaaccagctcggccgactcaccgccatggacgccgcgaccatcaagggcgtcgtcgaacgcctggacaaacggggactgatccagcgcagcgccgatccggacgacggccggcgcctgctggtcagcctcagtcctgccggacgcgccgaactcgaggccggcctggcggccgcccgcgagatcaaccggcaggccttggcccccctctccccgcaagaacaggaaaccctgcgcgggttgctcgctcgcctgacctgaggccattgcggtctatccttttgtccgcgttgcgtcgcccggagctgcgcctttcgtcgtagcggcctgccattgacagttcgccgcaggcgttcataacatgtttgtatacaaacaaattcccgcatagccgcatgctaccaggcacggctgacgggatatccgcctgatgaacagccatgccgccggcatggggagaaaccgccatgagcgatgcccttgccctgaccgtcaacggtcagtccctgcgcctcgatgtcgcccccgatacccccctgctctatgtcctgcgcaacgacctgcaactgaacggtcccaagttcggctgcggcctcggcgagtgcggcgcctgcaccgtgctgatggatggcgtcgccacccgctcctgcatcaccccggtggaggccgccgtaggccgccgggtggttaccctcgaaggactcggcgatgccgcccatccccatccgctgcaacaggccttcatcgacgaacaggccgcccaatgcggctactgcatcaacggcatggtgatgaccgccaaggcgttgctggatcgcaacccgaaccccagcgacggcgagatccgccaggaactggcctacaacctgtgtcgctgcggcacccatgtggagattctcaaggccgtgcggcgtgccgccgagagcctgaaggagcatcaggaggagcacccggcatgagcctggccaatccctcgcgacgcggcttcctcaaggccggcggcctgctgctggtcaccgtcaacctgcccgccccgctgctcgcccttgccgagcagggcgccaccgacctgccgctggaccaggtcgactcgttcatcgccattgccgcggacggcaaggtcaccgccttctgcggccacgtcgaccttggtaccggcatccgcacggcactggcgcagatcgtcgccgaagagttggacgtcgcgttcgagcaggtcgagatgatcctcggcgacacccgtcgcacaccggaccaggggccgaccatcgccagcgccagcatccaggtcagcgccgtgccgctgcgccaggccgccgccgaagcccggcgcttcctcctgcgccaggccggaagccatttcccggtgcatccggacagcctgcgcagcgaaaacggccaggtcttcgccgccgccaatccgcagcgacggatcggctacggcgagttgctgcgaggccagcgcttcaacctgaacatcgacggcagggcgccgctcaagccgcgcagcgagtaccgtctggtcggcaagccggtgcgtcgggtggacatcccggcgaagctgaccggtcaactgacctatgtccacgacatgcgcttgcccggcatgctgcatgggcgagtggtacgcccgccctataccggcgcggatgtcagcgccccgctcggcagcggcctgctggcggtggacgaaagctcggtcgccgggctgccggggctggtcaaggtggtcgtgatcggcgacttcgtcggcgtggtctgcgaacgcgaggagcaggcgatccgcgccgcgcgccagctcaaggtgcgctggaaggactggcagggcctgccgccgctggaacccgaccggctcgaggacacgcttcgccggcatccgaagaagccacgcacgctgcacgactcacccggtctcgagcagcacctcgcgggcatcgcccggccgctgtcggccacctatgtctggccctaccagttgcacgcctccatcggcccttcctgcgccctcgccgaggtcgatgcgcagcgcgctcgcgtctggtccggcacgcagaacccgcacgacctgcgcaacgacctggccaggctgctgcagcgcgagaccggggacatcgaggtgatccgcatggaagccgccggctgctacggacgcaacggcgccgacgacgtcagcgccgacgccgtgctcctggcgcaggcagtgggccgaccggtacgggtacaactgatgcgcgaacaggaacatggctgggaaccgaaaggcaccgcgcaactgatcgaggtccgcggcggcctcgacgagcaaggccgggtggcggcctacgacttcgccacctgctacccctccaacggtgcgccgaccctggccctgctcctcaccgggcggatccaggccaccccgcaggtggccgacatgggcgaccgcaccgcgatcccgcaataccgctacccgcggatgcgggtggtggccaacgacgccgcccccatcgtccgcgcgtcctggatgcgcggcgtctcggcgctgccgaacgtgttcgcccatgagtcctacgccgacgaactggcgcacctggccggtatcgaccccatcgccttccgccgccgctacctggacgaccagcgcgccctggcgctgatcgacgccctggtcgcccgcgccggctggcagccacgcacctcccccaacccagaggcgcgccgggacggcgtgctgaagggacgcggcttcgcctatgcgcgctacttccacagcaagtttcccggtttcggcgccgcctgggccgcctggatcgtcgacgtcgaggtgaacccggagaacggcgcggtgcgcgtcgccaaggtctgggtcgcccatgactgcgggcagatggtcaatcccgatggggtcaggcaccaggtccacggcaacgtcatccagtccaccagccgggtactcaaggagttcgccaccttcgaccgccgtggcgtcaccagcctggaatggggcggctacccgatcctcggcttccccgaactgccggagatcgacgtactgctgctcgaccgccccgagcagccaccgatgggcgctggcgagtcagcctcggtgcccagcgccgcggccatcgccaatgcgatcttcgacgctaccggagcgcgcctgcgacaggtgccgttcactccggaacgcgtactcgcggcgctgcgcagcgcgcaggcctgatccttttccccggggcgccgcggcgccccgcgcagtggatgactgacagatgaagaaggcaacacgcatcggcctctgggcctccggcagcctcgtcgcgctcgccgccatcgccctcggctacgcctggcaaccggccatcgggccactggaaggcacacccggtcccttcagcaccgagcagatcgcccgcggcgaacgcctcgccgccctcggcgactgcgcggtctgccacactcgcgaaggcggcccgcgcaacgccggcggacgggccttgccgacgccgttcgggacgatctacagcagcaacctcacgccggatcgcgcgagcggcatcggtggctggtcctaccccgccttcgagcgggccatgcggcatggcgtggcccgcgacggcagctacctgtatccggcgttcccttacaccgccttcaccaggactcgcgacgaagacctgaaggccctgtacgcctacctgatgagccagccggcggtgcacagcgaaacgcctgccaaccagctgccgttccccttcgaccaacgccagctgatggccggctggaacctgctgttcctggagcccggcgcctaccgcgacgagccgacgcgcaaccagcaatggaaccgcggcgcctatctcgccgaaggcctcggccattgcagcgcctgccactcgccgcgcaatgcgctcggcgcggaaaagtccggcagcgcgcacttcgccggcggcgaggcggagggctggaccgcgccagccttgaacgccagttcgccggcggccatcgcctggagcgaggaggccctctacgcctacctccgccacggctattcggcctaccacggggtcgccagcgggccgatggcgccagtggtcggcgaaggcctggccaagcagtcggacgaggacctgcgggccctggcccattaccttgcgtcctacgccgctgccccggccggggaaaccgatcagcaacaggcgcaacgcctcgaccggcagggctacggccgcgtgcaaccgcccagcggcagcggcgcgcgcctgttcgccggggcctgcctggcctgccaccatgacggcgacggaccgcgcttcttcggcgtgcgtccatccctggcgctgaacagcaatgtgcatgcggacagcccggacaacctgctgcggatcatcctcgacggcatccacagcccggccaccggcgacctcggctatatgcccggcttccgccatagcctcgacgaccggcaagtcgccgccctggccaactacctgcgcgagcgtttcgccggcaagcccgcctggccggacctcgcggccaaggcggcaagcctgcgccaacaggcggcgccctgaagcatgcggctcagttgggcaagcgcagggagcgggcgaagcaaccgggggtctggccgaaatgacgctggaacaggctgatgaacgccgaggtggagtcgtagccaaggtcgctggccacccgcgtcacgctggcgccctcctccagcgcggcgaccgcgttgagcagacgcaggcgctggcgccactcgcgaaacgacaactgggtctgctcgcggaacagccgcgccagggtccgtcgggaagcccccaccagtcccgcccaatccgagatgccacgcggatcggcgggatccgcctgtagcgcgtcggtgatccggcgcaagcgcgggtcgccaggcaacggcaggttcagcggcgcctcgcgaaggcgcccgacctcatcggcgaccacctgcatgagacgctcggcctcgccacccggcggatattcacggggaaactccgccgcccgcagcaacagttcgcgcagcaggccggacacctccagtacccggcaaccgccgggcagcgaacgatccaggtagagactgcggaacagcacagggttgcaagcctccgcggcgtgccggacgcccggcggaatccacagcgctcgctgcgccggcaccagatagctgtgccgctcggtgctggcgcgcaaggtgccgctggcggcgtacatcagttggccccaggggtggtcgtgcatctccacccggtgcccggcgggcatctcgaaggcgcgcagatacaccgcgcagggcaggctgcggaatcgcggcaggtcgcgttcttgtcccgtttgcggcatcggttgtccccatccgtcgagtgagcggtgcgtggccgatggtagcgtgtggctccccatagacaaaccggagccacgccatgagcagtcatcgcccgcaacatcgcctgtccgttcccgatatccagcgccgcaagggtgccggcagcctggtggcgctgaccgcctacagcacgcccatggcccgcctcctcgatccgcacgccgacctgctgctggtcggcgattcgctgggcatggtgctctatggcatgcccagtaccctgggagtgagcctggagatgatggtcgcccacaccctggcggtgatgcgcggcagccggcgcgcctgcgtggtggccgacttgccgttcgccagctaccaggaatcgccccgacaggcgttccgcaacgccgcacgcctgctggccgacagcggcgcccaggcggtgaagctggaaggcggtgaggaaatggaagaaaccgtggacttcctggtacgccgtggcataccggtgctcgcccatatcggcctgatgccgcagcaggtcaacgccatgggcggcttcaaggcccaggggcgtgacccggaaagcgccgaacgggtacgccgcgacggcctcgccatgcagcgcggcggcgccttcgcggtggtcatcgaaggcgtaggcgagccgctggcccgtcgccttagcgaagaactggcgatcccctgcatcggtatcggcgcctcgccggcctgcgacggccaggtactggtcagcgaggacctgctcgggctaagcggcgaacaggtaccgcgcttcgtcgaacgctacgcgcgcctcgaccgggaaatcgacgaggcggcccggcgcttcgcagaggacgtgcgcgaaaggcgcttccccgaggccaggcattgcttcgccatgcgcgagtgagccggcggtctcaggcgaagacttccgccagcaggtcgtccatcgcctggaaggcacgccgggaggtcctggcgtcatagtgcatcttgcccggcaccttggcgttcggatcggtgaaggaatgcaccgcgccgccgtagctggtgagctgccagtcgacgccggcatcggtcatctccctggcgaaggccggcaactgctcgcgcggcaccagcggatcggaggcgccgtcgaggaccagtaccgcgcccttgatgttcctggcatgcgccgggtccggcgtatccagggtgccatggaaggacacgaaggccttcagctcggcgccgtcgcgagccagctccagcgcgcagcaaccgccgaagcagaaaccgaaggcagcctggcgggtcgtatcgacagccgcgagcgcctgtccgcgcaaggccgccagcgctgcctgcatgcgcttgcgcagcagggcccggtcgttcttcagcggcatcatcgccgcgcccgcctcgtcgccgttctgcggacgcacgtccctgccgtagaggtccgccaccagcaccacgtgcccacggccggcgacctgccgggcgatgtccagcgcggcggcgctcacgcccatccagttcggcgccatcagcaggcccgggcgcggccccgcgtggctggcgtcgtacaccagttgaccttcgtacggctgcccatcgatgtcgtaggcgaccggctctacacgaatctcactcatgggtactgctcctgcgagagttggaaaagacaaagcccgccgaagcgggctttgtcggggctactgcttaagcggacagctccaccagcagcttgttcagtcggcgtacgtaggcgcccggatccttgaggctgtcccccgcggccagggcggcctggtcgaagagaatatgcgacagctcgccgaagcggtcctcgtccggctccgcatccagcttctcgatcagcggatgctgcgggttgatctcgaagatcggcttcgagtccggcactttctgcccgctggcctcgaggatctggcgcatctgcaggccaaggtcctgttcgccgatggcgaggatcgccggcgaatcggtcaggcggtgggaaacgcggacttcgctgacctgctcgtcgagcaccttcttcaggcgctcgatcaggccttccttgctcttggcgacttcttcctgggccttcttgtcctcttccgagtccaggctgcccaggtccaggtcgccgcgggcgacatcgacgaactgcttgccgtcgaactccggcaggtagctcatcagccactcgtcgatgcgatcggtgagcagcagcacctcgatgcccttcttgcggaagacttccaggtgcgggctgttcttcacctgcgagtagctctcgccggtgaggtagtagatcttgtcctggccttccttcatccgaccgatgtagtcggccagcgccacgctctgctcgcccgaatcatcgccggtggaggcgaagcgcagcaggccggcgatcttctccttgttgccgaagtcttccgccgggccttccttgaggacctggccgaagttcttccagaaggtcttgtactgctccggctcgttcttcgccagcttctccagcatgtccagcacgcgcttggtcaacgccgacttcatcgagtcgatcaccggatccttctgcaggatttcccgggagacgttcagcgacaggtcgttggagtcgaccacacccttgatgaagcgcaggtacagcggcaggaactcgtcggcctggtccatgatgaacacgcgctgtacgtacagcttcaggccccgcggcgcttcgcgatggtacaggtcgaacggcgcgcggcccggcacgtagagcagcgaggtgtattccagcttgccttcgaccttgttgtggctccagctcagcgggttctcgaagtcatgggcgacgtgcttgtagaactcctggtattcctcgtccttcacctcggcgcgcggacgggtccacagcgcgctggcgcggttgaccgtttcccattccggctcggccggcttgtcggcctcttcgccgtggaattccttgggcagctcgatcggcaaagcgatgtgatcggagtatttcttgatcacgttgcgcaggcgccagccatcggcgaactcctcctcgccctttttcaggtggaggacgatgcgggtaccgcgctcgggcttgtcgatggtagcgacgtcgaactcgccctcgcccttcgacgaccagtgcaccccttcgctggccggctggccggcgcgacgggagtagacatcgaccttgtcggcgacgatgaaggcgctgtagaaaccgacgccgaactggccgatcaggtgcgaatccttcttctggtcgccagacaagttcttcaggaagtcggcggtcccggacttggcgatggtgcccaggtgagtcaccacatcctcgcggctcatgccgatgccgttgtcttccagggtgacggtgttggcttccttgtcgaagctgacgcggatcttcagctcggcgccgccctcgagcagctcgggattggccagggcttcgaaacgcagcttgtcggcggcgtccgaggcgttggaaatcagttcgcggaggaagatttccttgttcgaatagagagaatgaatcatcaggtgaagcagttgcttcacttcagtctgaaagcccagtgtctctttttgggtttccacgctcatcgctccaagctccatcaatgacataagccgcgtaccacggcggatgtcccctaggtggggccttcttccggcttttcaagcgcttatgcgaaaaaaccgcgcaccatcgtgcgacgactagcgttcgagcagttcgagacgggcgatctccgccgggcgcaacaggtagctcgcctcccccgcaccgggcatttcccggcggatcaccaggcgcccctcgctgtcgaggccggtgaaacggccctcggcgatacgcccgcgtaccgtagtggccttgaccaggcgctggctgtagcgctgcggttcgacctggaccagctccaggtcgagggtggcgttacccggcgccggcagcgcctgcggctcgggcggcgccgccgccgcggccacggtcgcaggctccgccggcaaggcggggaacgcgtcgccgcgcaccgtccactcccgccgggcgttcttctccagcgtcagctccagcacctgagcctggccggccaccagggcctcgatacgcagcggccgcgcatggctggccgcgcgccaggacggcgcccgcacgaggctgacgtcgcggctggcgaaacgtcgctgcagatagtcgcgcaagaccagggccagggtatcgtcggagtcgtagcccaggtcgaccttgccgtgccgatagcgcagccggtcggtatacagctcgacgtggccgctgagggtggtccggtagtcgctcggcaggctcaggtggaactcgccctccaggcggttcggcgccttgggccgcaggtccaggtgcaaggtatagccacgcaggagacgacgcgcctcgggcaggtcctgatccggttgcagccagctcagctcgacttctggcaacgcgccgccgtcctcgggcagcacatccaggcgcagcgccccgagcggctgtgccggaaggcggatctgcagctcgcgctgggcgtagaaatcgtgcccctggcgcaggctcagcacgccgccgatcaactcgccgctctgcggcgcgaaaggcttgccgttgaactccccgctgagcgcgatggccagttccgccggcggcctggcctccggtttcagccagcgcaggctgaggatcgcctccagtcgcgcagcgtcgtgactggccagcagcgccaggccgaccaccagcgggatgcaacccagcgcggccagcccgacgcccttgcgcgccgtacgccagtgcacgccgatataggccagcgccaccggcgggaaaaggctgccgtaaccccacagcagaccggtaccgaaggccaggacgatgacccagatatagccggcgaccatcagcagcaggccgcccagaatcagcaaggcatccatcgcgatatcctcagcccactttccgcagcgtacggctcacggctcgtccaccttgaaatgcgcccgcgcagtggcgatgggctcgccctgggtggtctgccaggcgttgatcgcgacgttcgccacccgtcgcccctggcgccagacctggcattgcgcgtaggtatcgcggaagtgcccggcacgcaggtagtcgatggagaaatcgatgatcttcggcaggtgcggaatgctcatgaaggtcagcaggtgcaacatcgccgcatgctccatgaagccggcgatcacgccgccatggatggccggcagggtcgggttgccgatgttgtccttgttcgccggcaggcggaagaccatgtcgtcgcccaggcgcaggcattcgatgccgagcagcttggcgtacgggatcagctccaccagcgggctgtagtcgttgttccgacgcgcgtcgcggaccagttgctcgaggctggtcgggctcatgccgcacctccctgcgcggccggcctggccgccccggcgcgggccgaaccgcccatgcgcatgaaagcgccgacgacatgggcgatgggctggcccggatcgtcctggtaggcgaagccgcgggtgaagatcacgttcggcgtgacccggtagcactcggcgaagccatagacatccttgtgcggttcggcgggatgcatgtagtcgatgcgcaggtcgagcgtcgggcagatctcgaagtccggcagcacgcagaccgtggaaataccacaggtggtgtccatcagggtggtgatcgcgccgccgtggacgaccccgctttccgggttgccgatgatcgcctggctgtagggcaggcgcagggtcagtcctttctcgtcggcggcctcgaccgtcaaccccagcacctggcaatgacgcaaggccgagagaaagcgccgggcgcgctcgaggagaggattttccgacatgacggcgaccttgctgggagttttctggagggcgaatcataccctgccgccaaagccccggcagccggggttttggacataacgatcgaaatagtcgaagtgtgtggaacttcacgccagcgcaaatgttcaaagggctacaacgaggaaagccgcacatggaggctaaacgatgaaaaagaccgtaactcttgccctgctgctcgctgccagccttggcctggccgcttgcgacaagaaagaggaagacaaggcagcggccccggcagctccggctaccgagacccagccgagcgctccggctactccccctgccgagcccagcgccccggcgccgtcgagcgacactccggcaaccccgcagactccggcaccgactccggagcaaccgcaacagaaccagcaataagttctcgttgacgtaccctgaaagagcccgcgcaagcgggctttttcatgcccgggattcagcccctgggcacctcgccctcgccttcccgcgggctttcggcgattgcggtctcggtgtagaccatcacctccagcacgtccgaatggaattcgcggcgatacaggaccagcaccacgccggccgtcaccagcatgaagaaccaggaattgatgaaccaggcgagcatggccaggccgaaatagtacgagcgcaagccgaagttgaactggttggccgccagcgagatgacccgggcggcacgctcggcaaaggatttgcgctccagctcgccgacgttgcgctcgccgatcatcggtgccgagccgaccaggatcgccgcgaagttgtattggcgcatgcaccagctgaaggtgaagaaggcatagacgaagaccactgccaggcacagcagcttcagttccgatagtccccggctggcctcctccacgaacggcaggtcggccagtaccgagacggcgcgatcggtggagcccagcagggtgaggatgccggcgagaatgatcagcgtgctggaggcgaagaacgacgcgttacgctccaggttaccgatcacgctggcgtcggcgatacggttgtcgcgcagcagcaaccggcgcatccagtcctcccggtagaggtgcaggacgctggccaggcaggcggtgtcgcgacccttccaggtggcgtagcgggtgtagcccacccagcagaacaggaaccagagcgccgccagcaggtgttgcagcaggtgcccgttgaaaatgccgagttcggcggtcatgaaaactccctcttgagccggccgggaatcgccccgccgttgtttcgcgccgttgggacgccactcgccgcggccaggacacgactttcgtcggctcatgaaaaaggccgcccggaggcggccttcctggggttcgcctgacgtctcaggcgaccgcttcgcgcggcttgcccagcagccgatcgcaaacgactgccaggaccagcgcaatggataccggcagcagccagccaaggctctgatcggcgagcggaagcttggcgaagacgtccggcacccacccgttcagcttggccgcccccagcccgtcgacgatgccgaagagcagcgcgacgatcatcaccggcacgaacacccgcggggccgacacccagagccggtcgaacaggctcagggcgatcagcacgatggcgagcggatagagtcccaccagaaccggtaccgaaaggctgatcaactgggtcagtccctggttggcgaccagcaggctgaacagcgagaacacgatcaccaccgtcttgtacgaaaccggcagcaggtcgctgaagaactcgccgcacgccgtgatcagccctaccgccgtggtcaggcaggccagggtgatgaccaccgccagcaacaggctgccggaaacgccaaaggtctgctgcacataggcggtgaggatctgtacgccattctgggcgtcgccggcgatgccctggctggtggcgcccagatagaacagcgccaggtagaccagggacaggccggtggcggcgatgaccccggcgatcatggaatagcgcgtgaccagccggctgtcgctgatgccgcggtcgcgaatggcggtggcgatgacgataccgaagaccagcgcaccgagggtatccatggtcaggtagccctgcaggaagccctgcaccaggggcgcgctctggtactcgccggaactgctgccgatctctcccgccggcgcgaagatcgccgcgccgccaaggaccagcagggccgacagcagcaccggcgtgatgacctttccgacccggtcgacaaggcgacccgggttcagcaccaggaacagaaccacggagaagtaagcgacggtatagacgagcaacggcacgccgccgtccccggtgaagggtgcgacgcccatctcgaaggacaccacggctgtacgcggggtggcgaacagcgggccgatggcaagatagacggcgatggcgaacgccactcccgcgcgccgcccgatcggctgggtcaggcggccaataccgcctccgacccgggccagggcgaccaccgtcagcaacggcaggccgacaccggtaaggaggaagccgaaagccgcgctccatacgtgttcgcccgccgccatgccggcactgggaggaaagatgatgttacccgcgccgagaaaaagcgcgaacgtcatgaagccaagggcgagcaggtcgaaccctttcaaatgagtcataggaggatgtaccactggcagaagtctcggttgttcggggtttccctttgggggtgttaggaaacaacgtccttccggatgaggaggaccggtcaagccgcccgaccccttttgagggccatgtggcgttatagctgcaggcgcactggcctgcgggatgatgcgtggcgcgcccggggttttgtcggacacgaaccgttggcaatgatagcgcatcgcggcaacattcgtttgacggatgcgatagaacgacgaaggccaccgctgtgaggcggtggccttcgtcctggaactcagaaaacccgggaaatcaggccttcttcacttcccaaccggtcagctcggccagggccttgccgatgtcggccagggaacgcacggtcttcacaccggcgtcctgcagggcggcgaacttctcgtccgcggtgcccttgccgccggagatgatggcgccggcgtggcccatgcgcttgcccggaggggcagtcacaccagcgatgtaggacaccaccggcttggtcacgttggccttgatgaaggccgcggcttcttcttcggcggaaccgccgatctcgccgatcatgacgatggcttcggtctgcggatcttcctggaacagcttcaggatgtcgatgaagttggagcccgggatcgggtcgccgccgatgcccacgcaggtggactggccgaagccggcgtcggtggtctgcttcacggcttcgtaggtcagggtgccggaacgcgacacgatgcctaccttgcccggcaggtggatgtgacccggcatgatgccgatcttgcactcgccgggagtgatcacgcccgggcagttcgggccgatcaggcgtacgcccagctcgtcgcacttgaccttggcgtccagcatgtcgagggtcgggatgccttcggtgatgcagacgatcagcttgatgccgccgaatgccgcttccaggatcgagtccttgcagaacggagccggaacgtagatgaccgaggcttcggcgccggtggcttccacggcttccttgacggtgttgaacaccggcaggccgaggtgggtggtgccgcccttgccgggggtcacgccgccgaccatcttggtgccataggcgatggcctgttcggagtggaaggtgccctggctaccggtgaagccttggcagatgactttggtgtctttgttgatcaggacgctcattacttaccctccgcggccttgacgacttgctgggcagcgtcggtcaggctggttgccgcgatgatgttcaggccgctttcggccaggaccttggcacccagttcagcgttgttgccttccaggcggacgacaaccggaaccttcacgccgacttctttgacggcgccgatgatgccttcggcgatcatgtcgcaacgcacgatgccgccgaagatgttcaccaggacagccttcacgttgctgtcggacaggatgatcttgaacgcttcggtcacgcgctccttggtcgcaccgccgccaacgtcgaggaagttggccggcttgccgccgtgcaggttgacgatgtccatggtacccatggccaggccggcgccgttgaccatgcagccgatgttgccttccagcgcgacgtagttcagctcccacttctgcgcatgggcttcacgggcgtcgtcctgggacgggtcgtgcatggcgcgcagcttcggctgacggtacagggcgttactgtcgatgttgatcttggcatccaggcagtgcaggttgccgtctttcttgatcaccagcgggttcacttccagcagggccaggtcgtagtcctggaacagcttcgccaggccgacgaagatatgggtgaactgcttgatctggtcgcccttcaggcccagctggaaggccagctcgcggccctggtacggctgcgcgccgaccagcgggtcgatggtggccttgaggatcttctcgggagtgtcgtgggcgaccttctcgatgtccacgccaccttcggtggaagccatgaacacgatgcggcggctggaacgatcgacgacggcgccgaggtacagctccttgtcgatgtcggtgcaggactccaccaggatcttgctgaccggctggccgttggcgtcggtctggtaggtcaccaggttcttgcccagccactgctgggcgaacgccttggcgtcctctttgctcttcaccagcttcacaccgcccgctttaccgcggccgccggcgtgcacctgagctttgacgacccactcgctgccgccgatcttgtcgcaggcttctgcggcctcttcgggggtgtctacggcaaagcccttggatacaggcaggccgtattcagcgaacagctgcttaccctgatattcgtggagattcatgcttgtctaccgttattcgtctaggtattgcgcatttcggcggagcgctcgtggcgccccaccacctgtgaccgtcgtttcgcgaaccacccggctcgcgaaaaaacagtccggcggcatacgcccgcggccacctcgcaacggtcgccggcgctcacccgccgtggttcttctgaaagtctgccgcctgcggcatcccgacgcaggcggcaaaccgtggattctacagaacccggacccgacaaggccaggaacctgtcctggcctgacggacgacgcgtcccgcgtcgctgtgacgcccctggcgtgaaccggggcgtcggatcactcagcgcttcttgcggttggcgatgtggatggcatggccattcactgccagggcagcttcgtgcagggcttcggacagcgtcgggtgagagaagaccatcatgcccaggtcttcggcgctggtgccgaattccatgccgatcgcgccttgctgtaccagctcggcggcgctcgggccgatcacgtggacgcccaggacgcggtcggtcttcgcatcggcgatgaccttgaccaggccggtggtgtcgttggccgccatcgcacgaccgctggcggcgaacgggaaggtgccgacgttgacttcgacgccctcggccttgagggtctgctcggtcttgccgacccaggcgatttccgggtgggtgtagatgaccgacgggatcaggtcgtagttcatctgcgccttgtggccggcgatgcgctcggcgaccatcacgccctcttccgaggccttgtgcgcgagcatcgcgccgcgaaccacgtcaccgatggcgaagacgcccggaacgctggtcttgcagtggtcgtcgacgtagatgaagccacgctcgtccagggtcacgccgctgtcggcggccagcaggtcggtggtcaccgggcgacggccgaccgcgacgatcagcttgtcgaaggtttccttctgctcgccgttggcgtcggtgaaggtcacggtgacctgcttcttcttcacttccgaagcggtcacgcgggcacccaggcgaatgttcaggccttgcttggtcaggaccttcagggcttccttggcgatttgctcgtcggcagccgggaggaacttgtccagggcttccagcacggtcacctcggcacccaggcgggcccataccgaacccagctccaggccgatgacgccggcgccgatcacacccagcttcttcggcacggcctggaattccagggcgccggtggagtcgacgatgatgtcgtcggtcagcggggccggcgggatctccaccgggcgggagccggaagcgatgatcacgttctcggcttccaggacctgggtcttgccgtccagaccggtcacttccacctgcttgttggccagcagcttgccgtggccttcgaaggaggtcacgccgttggccttgaacagggtagcgatgccgccggtcaggttcttgacgatgttggccttgcgcgcaaccatcgccggaacgtcgatggtgacgcccttggcttcgataccatggactttgaaggcctctttggcctcatggtacttgtaggagctgtccagcagcgccttggacgggatgcagccaacgttcaggcaggtaccgccgagcgccaccttgccttccttgccgatgtacttctcgatgcaggcggtcttcaggcccagctgggcagcgcggatggcggcaacgtaaccgccggggccggcaccaatcactaccacgtcgaatttctggctcatatctcaatccttattcgggtgaaaccggacggccccacgagggggccgccgtgaagagaaacgctaaatcagacgtccagcagcaggcgagccggatcttccagcaggtccttgatcgccaccaggaagctcaccgcttccttgccgtcgatcagacggtggtcgtaggacagcgccaggtacatcatcggcaggatcaccacctggccgttcacggccatcgggcgctcctggatcttgtgcatgccgaggatggcggtctgcggcgggttgacgatcggagtcgacagcagggaaccgaacacgccaccgttggagatggtgaaggtgccgccggtcatgtcttcgatggtcagcttgccttccttcgccttcttgccgaagttggcgatgccgccctcgatctcggccaggctcatgaactcggcgttacgcagcaccggaaccaccaggccgcggtcgctggaaacggcaacaccgatgtcctggtagccgtggtagacgatgtcgttgccgtcgatggaagcgttgacccccgggaagcgcttcagcgcctcggtggcggccttgacgaagaaggacatgaagcccaggcgcacgccgttgtgcttcttctcgaacaggtccttgtacttcgaacgcaggtccatgatcggcttcatgttgacctcgttgaaggtggtcagcatggccatggcggactgcgcctcgaccaggcgctcggcgaccttggcccgcaggcgggtcatcggcacgcgcttctcgacacggtcgccggcggcgaagatcggcgcctcggcagccggggcggcaggcttggccggggcggccggggcgttcttcttcgcttcgaccgcagcgaccacgtcttccttggtcacgcgaccgcccttgccggtgccggcgatgctgttcggatcgatgccggcttcctcggccagcttgcgcgcggccggggacaggatggcgtcgtcgccgccagcggcggccggagcggcggcctgggcagccggagcggcggcgggcgcagcggcagccggagcggccggagcggcggcgccgccttcgttcagcttgccgagcagctcgttgctcagaacggtgtcgccttcgttcttgatgatctcggccagcacgccgtcagcctcggcgagaacctcgatgaccaccttgtcggtctcgatgtcgacgatcagttcgtcgcgcttgactgcttcgcccggcttcttgtgccaggtggcgacggtgccgtcggcgaccgattccgggaaggttggggctttgatttcgatagccattgtgtgcgtttccttaaattcggtttcttcagcgcgtaggcgttaaacagtaaaggcgtcttgcagcagtttttcctgctgctcggcgtgcatcgaggcgtagccgcaagccggagcagcggagccttcgcggccggcgtactcgagattgaggcccttcttgtgcgcggcgatgacacgacgcatgtgatgctggctgcagaaccaggcgccctggttcatcggctcttcctggcaccagacgatgtgcttgaggttcttgtacggagccagaacttccgccaggtcgtcttccgggaacggatacagctgctcgatacggacgatcgcggtatcttcgcggccttccgcgcgacgcttctccagcaggtcgtagtacaccttgccgctgcacagcacgacgcggtcgaccttcttcggatccaggctgtcgatttccgggatcacggtctggaaggaaccgttggccagatcttccagggtcgagatggcgagcttgtgacgcagcagggacttcggcgtcatcaccaccagcggcttgcgcagcgggcggatcacctgacggcggagcatgtggtagacctgagccggggtggtcggcacgcagacctggatgttctgctcggcacagagctgcaggtagcgctccaggcgcgcggaggagtgctccgggccctgcccctcatagccgtgcggcagcagcatggtcaggccgcagagtcggccccatttgctttcgccactggtgatgaactggtcgatgaccacctgggcgccgttggcgaagtcgccgaactgggcttcccagatcaccagcgagttcggcgtggtggtggcgaaaccgtattcgaacgccagcacggcctcttccgaaaggaaggaatcgtagatatccaggcgcggctggccgtcgaacagattggccagcggtacgtagaccgagtcgtccttctggttgtgcagcaccgcgtgacggtgcgagaaggtgccacggccgacgtcctggccggtcatccgtaccggatggccttcgaacagcagggtcgcgtaggccagggtctcggcgaagccccagttgatcggcaggccaccggccgccatcttctggcgatcttcgtagatcttcgaaacctggcgctgaaccacgaagccttccggcacttccagcatcttgctggacagttcctgcagggtcttcaggtcgaagcgggtgtcgtgacgcgcggtccaggcatgacccaggtacggacgccagtcgacgaacagttccttgttgggttccttgaccaggctcttcaccacgtgcaggccgttgtccagggcgtcgcggtagtcgtcgatcttcgactgaacctgctcggcgctgagcacgccggcgttcaccagggcgtcggcgtacagctcgcgggtagtacgctgcttggcgatctgctggtacatcagcggctgggtgccgctcggctcgtccgcctcgttgtggccgcggcgacggtagcagaccaggtcgatgaccacgtcacgcttgaactgcatgcggtagtcgacggccagctgggtgacgaacagcacggcttcgggatcgtcgccgttgacgtggaagatcggcgcctgaatcatcttcgccacgtcggtggcgtactcggtggaacgcgcatcgtcctggcggctggtggtgaaaccgacctggttgttgatcaccaggtggatggtgccaccggtcttgtaggcgcgggtctgcgacatctggaaggtttccatgaccacgccctgccccgcgaaggcggcatcgccgtggatggaaatcggtaccaccttgtcgccggagctgtccttgcggcggtcctggcgagcacgaacggaaccctcgaccaccggggaaacgatttccaggtgcgacgggttgaacgccagcgccaggtggacttcgccaccgctggtcatcacgttcgaggagaagccctggtggtacttcacgtcaccggagcccagctcgacgatcttcttgccttcgaactcgtcgaacaggtcgcgcggattcttgcccagggtgttgaccaggacgttcaggcgaccgcggtgggccatgccgatgacgatttccttggcgccgtaggaaccgcagcgctggatgatctcgtcgaccatcgggatcaggctttcgccgccttccaggccgaaacgcttggtgcccgggtacttggtgcccaggtacttctccaggccttcggccgcggtcaggcgctcgagcaggtgcgcacgcgcctcggcggagaagccgggacgaccacgcacgctttccagacgctggaggaaccacttgcgctgctcggaatcgacgatgtgcatgaactcggcgccgaaggtaccgcagtaggtgctcttcaggctgtcgacgatttcacgcagggtcgcctcttccttgccgatgtaaagctcaccggtgcggaaagtggtgtccaggtcggcacccgtcagaccgtagtggtcgatcgacaggtcggcaggcgcgggacgctgccacaggccgagcgggtcgagggtggaagcctggtggccgcggagacggtaagcgtgaatgagacgaaggacttcgacctgcttcttctcgtgctcgctgctcacgctaccggcggaaaccggctgggcacggcgctggttcttggccagcaggacgaaatgatcgcgcactgtggagtgcgagacgtcgggggcgggattgccatcggcgggaagcttctggaaatacgtgcgccactcttctggcacagcgttagggtcgtgcaggtagagctcgtagagctcttcgacgtaggcagcgttaccaccggatagatgggcactgttccacatccgctgcattacgctttcgtgcatgctaggtcaccctcggtaaggggacaaccacctggcgaaaccttgaaggctccgaagtcctcaggcagcgacatcggtatggccactacagatcccgcagatagtccgggtaccagcccggatgcccctgctggtcatatttttcaaatctgggccatggctttgtgagcttggcccgcttagttgctgcgacgccggaagaactccggcgccacaggtgttgctaggtacaactcatataacaactgcgagaggatcaggttccgctctgcagcagcatattacgcacgtggccgatcgccttggtcgggttcagacccttcgggcaaacgttcacgcagttcatgattccgcggcagcggaacacactgaacgggtcgtccagcgaagccaggcgctcttcggtcttggtgtcacggctgtcggccaggaaacgataggcttgcaggagtgcggccggaccgaggaacttgtcggggttccaccagaaggacgggcaggaggtcgagcagcaggcgcacaggatgcactcgtacaggccgtccagcttctcgcgctcttccggggtctgcagacgctcgatggccggggccggcgtatcgttctgcaggaacggcttcaccttctcgtattgcttgtagaagatgctcatgtccacgaccaggtcacgaatgaccggcaggccgggcagcggacggatcaccagcttgccgcccttcaggccggcggccgacagcggggtgatgcaggccaggccgttcttgccgttgatattcatgccatcggagccgcagacgccttcacggcaggaacgacggtaggagaagccctcgtcctgttccttgatcagcgccagcacgtcgaggaccatcacgtccttgccgttggtgtcgacctggaaatcctgcatgtacggcgcagcatctttgtcggggttgtaacgataaacactcacttgcaacatggcgggcacccttagtaagtccgaaccttgggttcgaatgccggaacggtcttcggcgcgaagttgacggaacgcttggatacgcgcttctcacccgggaagtacagggtgtggcacagccagttctcgtcgtcgcgctcctcgaagtcttcacgggcgtgggcgccacgggactccttgcggtgctcggccgcgatcgcggtggcctcggccacctcgaggaggttttgcagttccagcgcttcgatgcgcgcggtgttgaatgcctggctcttgtcgttgatcttgacgttggcgatacgctcgcgcaggtcggccagctgggcgatgcccttctgcatgtactcgccggtgcggaacacaccgaagtagttctgcatgcagctttgcagctcgcgcttgagcggagcgacttcttcgccactggtgcgctcgttcacgccgttcaggcgcttgaaggaggcttccaggtcgctctcggaagcgccgcgggcgtcgatgccctctttcagcgctttttccaggtgcagaccggcggcacggccgaataccaccaggtcgagcagcgagttgccgcccaggcggttggcgccgtgtaccgatacgcaggccacttcgcccacggcgaacaggccttcgacgatctggtcgttgccgttggcgtcctgggtgatggcctggccatggatgttggtggcaacgccacccatcatgtagtggcaggtcgggatcaccgggatcggcgcaacgaccgggtcgacgtgggcgaaggtcttggacagttcgcagatgccgggcaggcggctgtgcaggacttcctcgccgaggtggtcgagcttcagcagcacgtggtccttgttcgggcccacgccgttgccggccaggacttccttgaccatggaacgggcgaccacgtcgcggccggccaggtccttcgcgttcggcgcataacgctccatgaagcgctcgccgtgggcgttgatcaggtaaccgccttcgccgcggcaaccttcggtgaccagtacaccggcgccggcgatgccggtcgggtggaactgccacatctcgatgtcctgcaccggcacgccggcacgcagggccatgcccacgccgtcaccggtgttgatcagcgcgttggtggtggaggcgtagatacggccggcaccgccagtggccaggaccacggccttggaacggatgtagacggtctcgccggtctcgatgcagatggcgatgatgccgaccaccgcgccgtcctggttcttcaccaggtcgaccgcgtaccactcgttgaggaacgaggtgccattcttcaggttggcctggtacagggtgtgcagcagcgcgtggccggtacggtcggcggcggcgcaggtacgggcggcctggccacccttgccgaagtccttggactggccgccgaacggacgctggtagatgcggccggtttcggtacgggagaacggcaggcccatgtgctcgagctcgaacacggcctcggggccgacggaacacatgtattcgatcgcgtcctggtcaccgatgtagtcggagcccttgacggtgtcgtacatgtgccaacgccaatcgtcgttcgggtcggccgaagcgatcgcgcaggtgatgccaccctgtgcggatacggtgtgggaacgggtcgggaagaccttggtcaccacggcggtcttgtggccgccctgggccagttgcagcgcggcacgcatgccggcgccaccgccaccgacgatgatggcgtcaaaggaaagtgtacgaatgctagccatggatcacataccccaaagaatctgcacaccccagacgaagaatgcgaacatcgccatgccgcaaaccgcctggaagaggaaacgcacgactgtcgccgccttgccgagagccatcgaagtcaggtagtcggtggagatggtccacataccgacccacgcatggacgctcagggcaaccagggtcaacaggctgaagatgcgcatccaaccctgcgagaacaggccgtgccagtccgcgtaggaaatgttggggtgagcaatgaggtagcccagcaggaaaatgacataagccgcgagaacgaccgcggaaacgcgctgggccatccagtcgtagaggccggagcgcgagaagtttgtgacgttagttaccatacccatacccccgccagaacgatcagcaccaccgcgatggcgatgacgattttggagccacgcttaccgccttccagcgtctcgccgacgccagcgtccatgaccaggtggcgaacaccggccaccaggtggtacagcagcgcagacagcaggccccagatcaccagcttggccaggggactggtcaggcacgccttcacctgctcgaagccttcttccgaactcagcgacttgtcgagcgcgaacagcagcacggcaataccgaggaacaggatgacgccagagatacggtggagaatggacgtgtaagcggtgacagggagtttgatggtccttaggtctaggtttacaggtcgtttgctattcacggcttttttcacactgagagccctaacgaacagggctagttgtcgggaagtgcacttgtcaggtacccatcaccagggagtggcgaccgtctatgaaagcgggccaggaataccccttgcggtcggacgccgagtatagacagttaggctactaatgacaacgaaaacacccatcgccaaatggttgattgcgggccttttataaaaggcgtaaatagccccctttttctgcgaaaaccccgccacggaaggctctacggcatggattcgcgcaaattgactttcgaatttatccctctatagtggtgcgggccctgcgtggggggtactgatgatttcaagcataaataggaggccatcatggctgacaaaaaagcgcagttgatcatcgagggctcagcccccgtcgaactgcccgtcctatccggtaccatgggtcccgatgtagtggatgtacggggcctcaccgccacgggccacttcaccttcgatcctggcttcatgtcgaccgcctcctgcgagtcgaagatcacctatatcgacggcgacaaaggcgtcctcctccatcgcggctaccccatcgagcaactggcagagaaatccgactacctggaaacctgctacctgctgctgaacggcgagctgcccaccgccgcgcagaaggaacagttcgtcggcaccatcaagaaccacaccatggttcacgagcagttgaagaccttcttcaacggcttccgccgcgacgcccatccgatggccgtgatgtgcggcgtgatcggcgccctctcggccttctaccacgactccctggacatcaataacccgaagcatcgcgaagtctccgcgcatcgcctgatcgccaagatgccgaccatcgccgccatggtgtacaagtactccaagggcgagccgatgatgtatccgcgtaacgacctgaactacgcggaaaacttcctccacatgatgttcaacaccccctgcgagaccaagccgatcagccccgtgctggccaaggccatggaccgcatcttcattctccacgccgaccacgagcagaacgcctccacctccacggtgcgtctggccggctcctccggcgccaatccgttcgcctgcatcgcctccggcatcgccgccctgtggggaccggcccatggcggcgcgaacgaagcggtgctgcgcatgctcgacgagatcggcgacgtgtccaacatcgacaagttcgtcgagaaggccaaggacaagaacgatccgttcaagctgatgggcttcggccatcgtgtctacaagaacttcgacccgcgcgccaaggtcatgaagcagacctgcgacgaggtcctccaggagctgggcatcaacgacccgcaactggaactggcgatgaagctggaagaaatcgcccgccacgacccctacttcgtggaacgcaacctgtacccgaacgtcgacttctactcggggatcatcctcaaggcgatcggcattccgaccagcatgttcaccgtgatcttcgccctggcgcgtaccgtcggctggatctcgcactggcaggaaatgctctccggcccctacaagatcggccgcccgcgccagctctataccggccacacccagcgcgacttcaccgccctcaaggatcgcggctgaaacccgtcacgcccggcgagaaaggctgcttcggcagccttttttgtgcccgcccctttccgccggacacaaaaaaaccgccccggaggcggtctttttgcaaggaaggcgcgctcagcgcttctcggcagcgctacgcaggcccttgagggtgttcagcggcgcgtcgaccacgaagctgttggccaaccaggaaggaatgctgccacccggctcggtttccacctggtaggtcacttccgtcacgccctgccccttcggctgcaacttccactcgccgaccagcttgggcacgcggatctggcccttttcctcggggatataggtcggatcggccttaaggtgacggatcacggtgccatccgcagtcttctcggtggtgacatggatgaccacgtcgcgaccggtaactggccagggcatgtcgatcttcgagtaggtccaggcgtcggcgccttcctgcttcaggagtttcatctcggcgcaggcatggatccacttgcaggaacccttgacgtcctcctgcagcgcctcgatggtcgccacgtcggccttgatgtcggtaacgccgcgataagccttgtacttggagccctggacactgctgaggtagaccttcacgccatcctcgtccttggccagcttccagtcttcggccagcgcattgccggccaccccgaacactgcggcagccagcacggtcatacgcaaaatgccacgcatcgttcctgttcctctctttatggttattttcggttcgccggccgggcggtcgacgccctgcaagccgcgatcctgagccttcggcgcaggatgcgcagcagtatggcgtgagacagccagacttccaacccgttcaagcggcagtgatgacttcccactccgcgatcagggccagcgcctgctcacggctgtcgccgcagatttccggatcggcgccgaactggccgcatacggccggtcgctccggtcggccgaacagcccgcagagatggttttcgtccaggtgcaggcagcgtacgcccgcgggcttgccggccggcatgcccggcagcggagaggaaatcgacggtgctatgcagcaggcgccgcagccggctctacattgcatgggaaggatctcgcccgaaagttggcagaggagcggccaggacagccgtccgaaacgggcgcaaagaatacggaccggccaggccgccgccaagcccggcggatcagcggcgcgtttccgcctcgagacgcgcgctgcgaagctgccactgctcgcggttgccggcagcgaacagccaggccctggccgactccgtcgctgcccgccattgcacgcggcccggctcgcgcaggtcgagggattgcgccgccgtcgagtggccgaggaaggcgttgccagcggaactccagtagccagcgatcccggccggcaagacccaggagcgaccttccgcctcgtcatcgacgataccggacaagcgctcccccgctccacgccgccaggacagggcgacccggttcagctcgctgtccgccagcgcgacgcgcacctccacgccgccctggcgcggctcgaacgacagctcgtaggcgctgagccggccatcggcgcagcgcaggtgccccttcagggacaagcgtcgaccgaccagttcgaagctctccaggctctgctcctggcagcgcaactgcaggcgaccggcgctttcccgcccggccccgagaaaaccgccctcgctctcccacaacggcggccgagcgctacccgccactgacagggcgaggctcttgccgccccagctcaagcggtattcgcccaggtcgaaatcgcgcgggatggcaaacgccggcggcacccgcagctcgctccacagagccggctcccgcgacgcccggctcgcccaccaggcggccgccagcacgacggccagcccgctcaaggcgagcccccagaccagcgagcgtttgtgcaaccgcatacctttcatccttttccgagcaccagtccctaccggtcgatgcctgcccacttggatttatcgccgcagccaattaggctgcggcgccgtcccaatcccccggagcccacccatcatgcccgtctggctgcaaaccgccttgttgctagcctgttccaacctgttcatgaccttcgcctggtatggtcatctgaagactctcaacagcaagccctggatcatcgccgccctgatcagttggggtatcgcgctgttcgaatacctgctgcaggtaccggccaatcgcatcggctacaccgaactctcggtcggccaactgaagatcatgcaggaagtcatcaccttggcgatcttcgtcccgttcagcgtctacttcatgcaacagccgctgaaactggactacctctgggccggcctgtgtctgctcggcgcggtgtacttcatcttccgcgcctgagccgcgtcacgaacgcagccgggcgatcaggctggaggtatcccaacgaccgccgcccatcgcctgcacttcggcgtagaactggtcgaccagcgccgtgaccggcaactgcgcgccgttgcgccgcgcctcggcgagcaggatcgacaggtccttgcgcatccagtccacggcgaagccgaagtcgaactctccggccagcatgctctggtggcggttttccagttgccaggactgggccgcgcccttgccgatcacctgcatcgccgcctcgccatcgagaccggcgcaccgggcgaagtgcagcgcctcggccaggccctggagcagccccgcgacgcagatctggttgaccatcttggtcaactgcccgctacccacgtcgcccattcgccggaccatccgcgcatagctgcgcaacagcggttcggcgcgtcgatagaaggcctcctcgccaccgaccatcaccgtcagggcgccgttgaccgcgcctgcctggccgccggagaccggcgcgtcgagaaagcccagctcacgctcggcagccagcagcgacagctcgcgggcgacttccgccgaagcggtggtgtggtcgacgaacaggctgcccggcgccattccggcgaaggcgccctgctcgcccagcgccacggcacgcaggtcgtcgtcgttaccgacgcaacagaacaccagctcggcgccagcacaggcctcgcgcggcgtatcggcgcgccgtccggcgtactcctcgacccagcgcagcgccttggccgacgagcgattgtagacacagacgtcgtagccctctcgttgcaggtgcccggccatcgggtagcccatcgtgcccaggccgagaaatgcgaccgcagtcattccgtcatctcctcgaaatccgatcccgcagcctagcacagcggtttgccgaggtccggaagccccgccatactcagcgcggaccctggtatggatagctccgatgcctcactggctggtaatcgatctggaggccaccaccgcggaaggcggctggcccctggaggaaatggaaatcatcgagatcggcgccaccctggtcgccgccgcggacgcccgcgaactggaccatttccagcgtttcgtacggccggtcaggcggccgctgctgacccacttctgccgcgacctcacgcatatcagccaggccaacgtcgatggcgctgcccatctcaatacggtctgggaagccttcgagcgctggctcgcccagcatcgtccgcgactggccggctgggccagttggggcgactacgaccgccgccagttggagcaggaatggcgccagcacgggctgaccagccagctcagcgaagtgccgcacgtcaatctcaagcaacgcttcggcgaagtccgccagttgccccgcccagtcggcctgaacgcggccctgcaactggccgggatgagtttccagggccagcagcaccgcgccctggagggtgcccgcaataccgcacggctgctgccgctggtattgccggtggagcattgaacgaggcccgcgccgcctagtgacgcctagtgacgcctagtgacgcctagtgacgcctttccgaggcttgggcatactggcgggccttttcaaacccgcctgttcaccccttcaggagaagcccatgttcaaggtcaacgaatacttcgacggcaccgtcaaatccatcgccttcgacatgaccgccggcccggccaccatcggcgtgatggcggcaggcgaatacgagttcggcaccagccagctggagatcatgcatgtggtcgccggcgcgctgacggtcaagctgccgggcagtgacgagtggcaggaatacgccagcggcagccagttcaccgtcccggcgaacagcaagttccagctcaaggtcgcccaggacaccgcctacctctgcgaatatcgctgagcccgggcagacaggaaaaccggccgcaggccggttttttcttgcccgccgtccagcggctgcggcggaggaatcgagctgcgctcatccgccgctggaacggcttgcccagcccattcagccctgcgggaagcggtagtggccgatgacctggtagcggaacagcaggtcctcttcccgcacgccggcaccgatgttgtgcaacaccagcggcctgccctccagcctgcgatcggaaagcacgccgatatgcagcaggccgttgtccaggcgccaggcgactatgtctccggcccggtaggcggaagcgtcgcggctaggcgccagggccaggccctggcggctgaaccaggtcatcaggttcggtacgcggcggtgatcgatgttgcggtcggtacctttcattccccattgctgcgggtaggccgcgaagtggcgacgcatgtcctcgtgcaccgccttctgtagatccagcccctgtccgcgcagcgcacggaccaccacgtcggtgcagaccccggtctgcagcggcacgtcgccgcccggatagtccagttgccggtaggccgggtcgtagcccagggtaacgcccacctgggcacgcgccgcatccaccagtcgctgcggttcgaccgcagcggccgccaccagcggcagtccgagcatggcgagcagcaacaggcggcgcagcgcgccggatacgtccttgtccatccttttcctcctaagcgcccgcgggcgcgtcctggtccttcgcgtatcccagcggatacagcagttcttccttgtagccggcccagacccggatggcgtccgggaagctgtcgtccagcaccgggtcgccgctgtcgaccagcaacggccggcccccgagggtccccagcttgcgcttggtggcgaccacccgcatgcgctccaggccgatggcgcgcaacacccggggactgatctgctggttgccgcgaccgatcacgtggccctggccgccgatggcggtgaccagcaggtacgccggatgaccgtccaccagttcgaacagccgcgcctcgtcgacgtcgcgggcaatcaccgcgccattctccagcacgtcgacgcccagcagggtggtttccaggccgagattgcgcgccaggccatgcaaggtcgagcccggtccgagcacatagcgcacgccgtcttcccagttttccgccagccagtcggcgaggtccaccagcaccagctcctcggactccatccctgcctgcttcacgtgctgcatgaagtggccctcctccggcaccgtcatctcgccgtaccaacgcgcggcgacgcggccggcgcgcagcgcctcttcgtcgagatcgcgcacctcgccgctggccaggcgcaccaggccgccctcgaccaggcgcctggccaattcgccggccgcgcgcggactgatggcatagaccccggagtggatcttcaccccggccggaatgccgagcaccggctgttgctcgcgcaccaccccggcaacatcccgtgctgtgccatcaccaccggcgaacaggatcagggcgacaccggcctcctgcaggcgctcgatcgccaaccgggtatccgccgcgctgctgaccgctccctgccactcgccgagcaggcgatggcggaagcccatgcgctcgagcaactcgccacccatggccccgggaaaggtcaggaactcgatcttctcgaccagcggcaacaggcactccagggctatccgggtgcgctccagcgcacgtggttcggcgcctctggccagggcctcggcggccaccccgtcgctacccttcaaggcgaccgggccacccagcccggccaggggattgaccaccaaccccaggcgaaacatgtccatactcatcctcgggcgaactccaggacgcccacaccggtcggaccactataaccagaaaaacccagcggtagccggcaagctggcacgccgactgcaagattgctatggtccatggctttcgcgttggagcggcacgacatccgccgtttgtcacggcggtttcatctgcgctccctagactgccgataaacctgatgaggagacgggcaatgaattcgcaacacaccgataccgccaagcgccgcgtgatccccttcaatacgcagcagcacaccggtggcgccatcatcgacgcccagggccgggagatcccgatcaccgaggtgatgatccagcgcgcctgccgcgaactggacaggtccctggagcaggaacagaagcaggcctgagcgcccgccagcacgacttcgaagcccggcatccgccgggctttttttcgcttgcgcgaagccgcgccctagctcggcgccggcaggtcctcgccgaccaggtcgaggaaggtctcgacgatccgccgcgaacgctgttcgcgcaggcacaccagggtctcggtcaggcgtcgctggcaatcgacgatgggtagcgcatggacccgcgtgtcggcgccgaactccgcggccgacaccacccccacgccgatccccgccaccaccgcctcgcgcgaggcctcgcggccctcgacctggatcgccggacggatccgcaggccggcgcggctcatctcctcctccagggtctggcgggtcaccgagccctgctcgcgcagcaccagcggcatgtcgtcgagatcggcgagccggatcgactcgcgcccggcccacggatggctgagtgaaacgaaggcgacgatcgggtcgttgcgcagggtcagcgaaagcaaccgctcgtcgctgacgtcccggcccaacagggccaggtcggcctggtagctgaacagtcgctgcagagactcgtcggtattgccggtctccacccgcaccgcgatgcccggatagcgctcgcagaaacgcgcgatctgcggcaatacgtgcaccggcgcatccaccgccagggtcagggtgccggtctgcagggcgctggaggcggacaacagctcctccgcctcggcctcgatcgcgaacagccgctgggtcaccgcgagcaggcgctcgcccagttcgctcaggcgcaccgagcgcttgttacggtggaacagcagcacgccgtaacgctcctccagcttgcgcacctggtcggaaaccgccggctgggtgagaaacaggcgctcggcggcgcgcgtgaagctgccgtacacggcgaccgcatggaaagccttcaactgtgcatgggataccgacatggaccttcaccattccaggcaggacaaggggttccgcgccatgggcggcgcacacgggaatgaccgttcggtcaacttcctcgacccacgccgcgccaggcttacggacaaacaagtaaaacttatatttaaaatttgataaatcgatttcatttatttatccggaattgtttccatcgcttcaccacagcgcgccagcgcctcggcagccagcccctgccagggcagccgcaacccttacccaggaggtgaagccgactccagatacctctgaccaggcaccgcgacatggcggtgcggaagtgctcatcagaacaacaacaaggcgtgttcccctcacacctgccggcaccgataacaagatcgaggtcagatccatgaatcaacgtcccgggacggcgctgccgtcctctcccgtgtccagcttccagcgctggcgcctgcagatattcgcgatcacctggctggcctacgccgccttctatttcacccgcaaggccttttccgtcgccaagctcggcatcgccgaagatccggacttccagttggacaagatggcgatggccgatctcgacgccatctatctcgccgcctatgccgtcggccagttcacctggggcgtgctggccgaccgcttcggcccgcgcatcgtggtgttcggcggcctgctgatctccgcactggccgcgctggtcatgggcaccttcgccaccctgccgatcttcgccacctgcatggtggtccagggactggcgcagtccaccggctggtcggggctgtgcaagaacatcggcagtttcttcgccacccacgaacgcggtcgggtgctcggcctgtggagcacctgctacgccttcggcggcctggtcgcctcgccgttcgccggctggtgggcgtacagcgtgttcggtacctggcacgcggcgttctactccagcgccgcggtggtcggcggcgtggccctgctgttcctgctgttgcagcgcaaccgcccggaagacgtcggccatcctcccgtcgaaccgcaggccgcgagcgaagccgtgcgctatgccggcttcaggccggaaggcggcaacggcggcagcctgcaggtgctcgccaaggtggtgcgcaaccgcacggtgctctgcctcggcctggcctacttcctgctcaagccggcgcgctacgcgatcctcctgtggggaccggtgatcgtctacgaacgcatgccggcgctcggcaaggtcggcgcggcgatcgttcccaccgccttcgaggtagccggcctgctcggcccgatcctgatcggcttcgcctcggacaagctgttcggcgcacggcgcatgccggcctgcgtgatcagcctgctggcgctgaccgtctgcctggcgctgttcgtcccggcgatgaccaccggcagcattccgatagtggtcggcctgctgttcatgatgggactgaccctgtacggcccggactcgatgatctgcggctccgccgccatcgacttcggcaccggcgaggccgccggcaccgcctccggcttcgtcaatggctgcggttcggtgggcgcgatcctcggcggtctgttgcccggctatttcgacacctacacggtgttcatcggcttcaccatcgcagccctgatcgccaccgcggtgctcctcccgcactggaacagccggcccggcggcgcacgggaaagcctgcggaatatccccagcctggcggacttccgtcccatccgctcctgaccgtccgcggcgggaacctccgccgcgtccttctccacgaaccgggaaccccctcatgcatatcgaacgtttcgaagtcgtcaagcgtcgggccgagatggccctgcacggcaacacggtctacatcggcggccaggtcgcagacgaccccagcggtgacatccaggaccagacccgccagattctggagaacatcgaccggctgctccagagcgtcggcagcgaccgcggccaggtgctctcggtacgcatcctgctcgcccaccgggaggactacgccggtctcaaccaggtctgggaccagtggtttcccgaaggccgggcgccgacccgcgcctgcagcctggccgagttgatcgacccgcgctggcgggtggaaatgatcgtcgtcgccgcccgcccgcagtgagagcacagccatgaccttccgacccttctggctggaccaggccctacgctccgaacatgcggcaccctgcccgccgctggccggggatacccgcgccgacgtgtgcatcgtcggcggcggctacaccggcctgtggaccgccatcatgctcaaggagcacgatcccgggctcgacgtggtgctggtcgaggccgatctctgcggcgccggcgccagcggccgcaacggcggctgcgcgctgtcctggtcggccaagttcttcaccctggaacggctgttcggactaaccgaggcgatccgcctggtcaaggcctccgaggacagcatccgggccatcggcgccttctgccagcgctacgacgtcgaggccgactaccggctggacggcaccctctataccgccaccaacccggcccaggtcggcagcaccgacagcgtgatcgccgctctggagcgccacggcatcaactccttcgccaagcgcccgctggccgacgtgcagcgcctggccggctcgcgcaggcacctggagggttggttctcgccggctgccgcgacggtgcaaccaggcaagctggttcgcggcctgcgccgggtcgccctgcaactgggggtacgcctgtacgaaggcacgccgatgcgaggactggagcacggccgcccggcggaagtggtcaccccccacgggcgggtcgtcgccggccgcgtggtgctggcgctgaacgcctggatggcgagggccttcccgcagttcgaacgcagcgtggcgatcgtctccagcgacatgctcatcaccgagccacgaccagacctgttgcaggagatcggcctgaccagcggggtcagcgtgctcgactcacggatcttcgtgcattactaccacaacaccccggacggccggctgatgctcggcaagggcggcaacaccttcgcctacggcggacgcatgctgccggtgttcgaccgcccctcgccgtatctcggacaactgcgcggcagtttgcgggagttcttccccgagttagccgaggtcgccatcgaggccagctggaacggtccgtcggatcgctcggtgaccggcctgccgttcttcggccggctcgacggccgcgacaatgtgttctacggcttcggctactccggcagcggcgtcggtccatgccacatgggcgggcagatcctttcttcgctggcgctcggcctggacaatccctggacccgttcgccgctgacccaggggccgctcggccgcttcccgccggagccgatccgctatgtcggttcgctgatggtgcgcaacgcgatccgtcgcaaggagcacgccgaagacgccggccggcgcccgcgtcatctcgacgtacgcctggccaggttcgccgccgccgcgggcaaggccgacaagggttgagccgctttccgggcgtctcttcagcccattcgggggcgcccttctttttccttcggtttcgatttcgctcaagcaaaggtcgtaaaaagcgcatttaattcacccgtcagcctgtgcgaggctgttccaacccctggcccagttttccttcatgcacctaccgacgacgcgcaccctgccctaccagccttccgccaacccggccggaacgcccgcgcgtctaccccgcaagcacagccgctggctggaactggagccgctctccctccctctcgaactggccttctgggcgctctggcattgccgccacgcgcgtccgccggacgctcgtcacgcctgatatccctccggccccgcgcaacggcggggccggcctgccgcttgcatgccgttccgcgacgctgccgtcgccggagcgccgctgcgagcgtcgcgacgctaccggacaagaccgacaagagagccccatgaacttcgcctgcgaacaagaagcccaggatttcctggccgccaaccccgacatcgaactcttcgaactgttcattctcgacgccaacggcgtgccgcgcggcaagctgctgcaccgcgacgagctgctggccgtctaccgcagcggccggccgctgccgagcaccatcctcgggctgacgatgaacggcgaggacgtcgaggactctggcctggtctgggacgtcggcgacatcgactgccgcgcctaccccctgtccggcagcctggtgcgcctgccctggcgacagatcccgacggcggcggtgcaggtcagcatgcacccgagcgagggcctgcccgccagcgtcgccgatccgcggcacctcctggtgcgaaccatcgacgcgctgaagagcgagggctatcacccggtgatggccgccgagctggagttctacctgctcgaccgtgagcgcgacgccaacggccgcccgcaaccggcccgcgacgccgatggcggccgcccacgggcgacccaggtctacggcctgcgcgaactggagcagatcgagccgttcctcgccgacctctatgccgcctgcaaggcgcagggcctgccggcacgcacggcgatctcggaatatgccccgggccaggtggaaatcaccctcgaccacggcgacgccctcgccgccatggaccaggcgatccgctacaagcgcctggtcaagggcgtcgcgcacaagcacgggatgctcgcctgcttcatggccaagccgttcgacgacctggccggcaccggcatgcacctgcacgtcagcctggccgacgaacaaggccacaacctgttcgccagcgacgaccccgccggcacgccgttgctgcgccaggcggtcggcggcatgctcgccagcctgctcgactcgctcctgctgttctgtcccaacgccaactcctaccggcgcttccaggccaacagctacgcgccgctggcgcagacctggggcgtcgacaaccgcaccgtgagcctgcgcgtgccgggcggcccggcctccagtcggcatatcgagcaccgcatctgcggcgccgacgccaacccctacctggccgccgcggcgctcctcgccggggtccaccgcggcatccgcgaaggcatcgatccgggtgcgccggtggagggcaacggctacgcccaggccggcaagcgcctgcccaccgactggctgaccgccctcgataccctgcaaggctccgagtgggcgcgggaagccttcggcgagccgttcctcggcgtctacctggcggtgaagcgcgcggaataccggcaattcatgggcgaggtcggcgagcaggactggcgctggtacctgacccaggcctgagatcccggacccgcccgcatacggcggcgcgccggcaggacgctccgcactggaacaaggaatacccgatgaacgcagcaatccatccccgtccggccgcggaacgcgcgccgtcctactacgccgccacgctcaacgaggaaaccgactatccgaccctgctgggcgcggtgacggtcgacatcgccatcatcggcggcggcttcaccggcgtcgccacggcggtcgaactggccgagcgtggctacaaggtagccctggtcgagacccatcgcatcggctggggcgccagcgggcgcaacggcggccaggtcaccggcagcctgtccggcgacgcggcgatgcacaagcagatgcgccaatggctgggcgccgaggtcgaggacttcatctggcacctgcgctggcgcggccacgagatcatccgccagcgggtggagaagtacggcatcgcctgcgaccttcgccatggccacctgcacgcggcgatgaaggccagccacatgggcgagctgcaggcctcctacgaggaggcggtgcgccgcggcatgggcgaccaggtggtcctgctggacaaggccggcgtccaggcccacctggagaccgagctgtactgcggcgcgctgaagaacacccgcaacatgcacctgcacccgctcaacctgtgcatcggcgaggccagggcggcggccggcctcggcgctctgatcttcgaacattccgaggtgctggatatcgtccacggcccgcggccggcggtgattacccgcgagggaaggatcgaggcgcagcagatcctgcttgccggcgatgtctaccacaagctcgaacgcaggcagctcaaggggatgatcttcccggccatgggcggaatcgttaccacccggccgctgggcgagctggcacgggagatcaacccgcaggggctggcggtctacgattgccgcttcgtcctcgattactaccgccccaccgccgacggccgcctgctgttcggtggcggcgccaactactcgggccgcgactcgcgggacatcgccgccgagctgcggccatgcatcgagcgcaccttcccgcgcctgaagggcgtggagatcgagttccagtggagttgcgccatgggcatcgtgatgaaccggatcccccagctcggcaagctctccgacaacgtctggtactgccagggctactcggggcatggcgtggccaccagccacatcatgggcgagatcatggccaaggcgatgagcgggagcctggagcagttcgacaccttcgcccgttgcaagcacctcagggtgccgctgggcgacctcttcggcaatccgatgctggccgccgggatgtggtactaccagctcatggagaagctgcgctgaagcgcgagggatggcggggtccgcggaaggcctagtcggccttcttgcggatccagtagagataggtgcccgcctcttcctgctgctcgaccagctcgtggccgaggaacacgcagaacttggggatgtcgcggcgggtcgagggatcggtggcgatcaccttgagcaggccgccgggcgccaggtcgcggaccttgttgtgcagcatcatcaccggctcgggacagttcaggccggtggcgtcgagaatggcgtcgacagaatgggtcatcgggaaactccgcaacagaatccgcgcattgtcgcgcatgcggcgcggccggtcacctgtccccggccggaatgacgccgcccctcagcgttcgaggcggcgtagatggcaggtcacttcctcgcggtcgtgatacagctgcttgcagccgatcgctaccttcaggccgcgcgcgtcgaagctctcgcgcaggcgctggaggatcttgcgcacctcggcgtagcgctgcttcatcggcagcttgaggttgaccaccgcctcgcggcaaagcccttcgccgatccaggtctcgatcaacgcaccggtgcgtgccggcttctcgacgatgtcgcagaccatccagtcgacccgctggcgcgggcggaactggtagccgtcgaccttctggtggtcgaccagcccggaatacatcaggttctccgccatcggcccgttgtccacggcggtcacccgcatctcccggttaaccagttgccaggtccagccgcccggcgccgcaccgaggtccacggcgagcatgtccggcgccaggcgcttgtcccattcgctgcgcgggatgaactggtgccaggcttcctccagcttcagcgtcgaacggctcggcgcctcgcggggaaacttcaggcgcgggatgcccatcggccagagcgcgctgttgcgcggctcggcgaggccgacgaagacttcccggccggagcggaaggtcagcagcaggcgcggcagcgccgggtcctcctgcaaccgcccggccttcaccagcgccgcgcgcagcggtttctcgaacttgcggcagaaggtcgacacctccttgccggcattggtgtccagcacctccagccagaggctgccgcaaaccggataactcgccagttccgccagcagtacctcgatgcgctggctttccggcaattcgatgaagccgggcccgcgcgcccactggcgcgggaagatcaagtcggagaaacgcaggcggcgcatcaggcgctcggcgccgtcggcgtcctggcagacgaactcgacgtgggcgctggccggcttgctcttggcgtagccgggaatctcgagagtggctgcatgctcggcgatttcggcgcagacttcaccttcgaagcctggccggcagtgcatcaacagggtattcatggggttgtctccttggccgcgcactatagtgccgggcatgcctcaagggaactgcagcgaccgttcgtcggtccagtgtatatggcaggagccctcgagccggtctagcttgaaggtttcgaacaacgctatcccaaagtctgactctcgccagcggccggtaccgatgggatcgggccaccgcgcattaccgaggtaacggcaccctggcgtccgcggacgccgcgggtcccgggcgaagccaggcactatcggctcgacgacgggcctggcgtcaggacgaggccaggcccgccgcccccgggcccgccgtgaggaaatcagaaatgcctgctttggacagcctgaaaacccttcgcagtctcgctgtggacggcaagacctaccactactacagcctcccggaagccgcccggaccctgggcgatctcggcaagctgccgatgtcgctgaaggtcctgctggaaaacctcctgcgctgggaggacggcagcaccgtcaccggcgacgacctcaaggccctcgccggctggctcagggagcgccgttccgaccgcgagatccagtaccgcccggcgcgggtcctgatgcaggacttcaccggggtgcccgcggtggtcgacctggccgccatgcgcgcggccatggccaaggccggcggcgacccgcagaagatcaacccgctgtcgccggtggacctggtcatcgaccactcggtgatggtcgacaagttcgccagcgaatcggccttcgaacagaacgtcgagatcgagatgcagcgcaacggcgaacgctacgccttcctgcgctggggccagaacgccttcgacaacttcagcgtggtaccgccgggcaccggcatctgccaccaggtcaacctggagtacctgggccgcacggtctggaccaaggacgaggatggcaggacctacgccttccccgacaccctggtcggcaccgactcccacaccaccatgatcaacggcctcggcgtgctcggctggggcgtcggcggcatcgaggcggaagccgccatgctcggccagccggtatcgatgctgatccccgaggtcatcggcttcaagctcaccggcaagctgcgcgagggcatcaccgccaccgacctggtgctgaccgtcacgcagatgctgcgcaagaagggcgtggtggggaaattcgtcgagttctacggcgacggcctggccgacctgcccctggcggaccgcgccaccatcgccaacatggccccggaatacggcgccacctgcggcttcttcccggtggacgagatcaccctcggctacctgcgcctgtccggacgtccggaaagcacggtcaagctggtcgaggcctacagcaaggaacagggcctgtggcgcgagaagggccacgagccggtgttcaccgacaccctgcacctggacatgggcgaagtcgaggccagcctggccggaccgaagcgcccgcaggaccgcgtggccctgcagaacgtcgccagcgccttcaacgagttcctcggcctgcaactgcatccctccagcaccgaagaaggccgcctgctcagcgagggcggcggcggcaccgcggtcggcgccaacgccgccttcggcgagatcgactaccagcacgacggccagacccaccgcctgaagaacggcgcggtggtgatcgccgccatcacctcctgcaccaacacctccaaccccagcgtgatgatggccgccggcctgctggcgaagaaggcagtggagaaaggcctgcaacgcaagccctgggtgaagagttcgctggcgccgggctccaaggtggtcaccgactacttcaaggccgccggcctgacccgctacctcgacgaactcggcttcgatctggtcggctacggctgcaccacctgcatcggcaactccggcccgctgctggagccgatcgagaaagccatccagcaggccgacctgaccgtcgcctcggtactctccggcaaccgcaacttcgaaggccgcgtgcacccgttggtgaagaccaactggctggcctcgccgccgctggtggtggcctacgccctggccggcagcgtgcggatcaacctcagcgaggaaccgctgggcaccggcaaggacggccagccggtctacctgaaggacatctggccgagccagaaggaaatcgccgaggcgatccagaaggtcgacaccgagatgttccacaaggagtacgccgaggtcttcgccggcgacgagaaatggcaggcgatccaggtgccgcagtcggacacctacgagtggcaggccgactccacctacatccagcatccacccttcttcgaacacatcgccgaggcgccgccggccatcgccgacgtcgagcaggcgcgggtgctggcggtgctgggcgactcggtgaccaccgaccacatctcccctgccggcaacatcaaggccgacagcccggccggccgctacctgcgcgagcacggcgtggaaccgaaggacttcaactcctacggctcccgtcgcggcaaccatgaggtgatgatgcgcggcaccttcgccaacatccgcatcaagaacgagatgctcggcggcgaggaaggcggcaataccctgtacgtgcccagcggcgagaaactggcgatctacgacgcggccatgcgttaccaggaggacggcaccccgctggtgatcgtcgccggcaaggaatacggcaccggctcgtcgcgcgactgggcggccaagggtaccaacctgctgggcgtgaaggcggtgatcgcggagagcttcgagcgcatccaccgctccaacctggtcggcatgggcgtgctgccgttgcagttcgagaacggccaggaccgcaagagcctgaagctgaccggcaaggaggtgctgaacatccgcggcctcggcggcgaactcaagccgcacatgccgctcagcgtggaagtgacccgcgaggacggcagccaggacagcttcaaggtcctctgccgcatcgacaccctcaacgaggtcgagtatttcaaggccggcggcatcctccactacgtgctgcgcagcatgctctgaggcagcggcggtacgcgcggaggggtggcttcggccacccctttttcattccggcgcccggggccgcgagcgcttcgcagggcgaacgacgccccggcgtcatccgccgataccccgcaggaccggcggatggccgcctcgcgcttatccgccaggcccctccccagcccatgcgcgccgccgggaacgacacgaaaccgtaacgcattgacctccatcagcgaatccgccatctatccgaccacgtggtcggctctcatgctttgggtcaatagctatctgtttttcctcgtgaaagcattcacaaatccctcatgtgaaaggcgttttcgccgatgcagaggtaaatgcttcacttgttttggaaggcccatgcgcaacaatcagcccatcacccagcacgagcgcgtctatccggcggaacaacgcctgatcaccaccaccaatctcaaaggcatcatcacctactgcaacgaagccttcatcgacatcagcggcttcagtcgcgaggagctgatgtccgcgccgcacaacctgatccgtcaccccgacgtcccgccggcggtgttcgcccacatgtggaccaccctcaaagccggccgcccgtggatggggatcgtcaagaaccgctgcaagaacggcgaccactactgggtcagcgcctatgtcacgccgatctacgaccagggcgcggtggtcggctacgagtcggtgcgggtcaagccgaccaccgaacagatccagcgcgccgaggccctctaccgtcgcctcggcgccggcaagccggcgatcccccggcgcgaccgctggctgccggtactgctcgactggctgccgttcatcctgatcagccagatcggcttcctcatcggtatctggctgaactcctggtggggcttcatcctcgccggcctgctcgccgttccgctcggcctggccggactgcgctggcagaagcgcgggctgaagcgcctgatgcggctcgccgaacagaccacctccgacccgctgatcgcgcagatgtacaccgacagccgcggcgaccaggcgcgcctggaaatggccatcctcagccaggacgcgcgcctgaagacctgcctgacgcgcctgcaggacaccgccgaatacctcaccgaacaggcgcgccaggccgacaccctggcccaccacagctccgccggtctggaacagcagcgcgcagagaccgaacaggtggccaccgcggtcaacgagatggccgccaccacccaggaagtggcgaacaacgtccagttgaccgccgacgccacacagaaggccaacgaactgacctcgcgcggccgcgacatcgccgcggagacgcgcaacgccatccagcgcctgtctgagtcggtgggcgagaccggggccgcggtgagtcgcctggcccaggacagcaacgagatcggcggcgtggtcgatgtgatcaagggcatcgccgaccagaccaacctgctcgctctcaacgccgccatcgaggcggcgcgggccggcgaccagggacgcggcttcgccgtggtggccgacgaagtgcgctcgctggcgcaacgcaccgcggcctccaccgagcagatccaccatctgatcgccaagttgcagaacaccgccaacgatgcggtacataccatggagagcggcctgcagcaggccgaagccggggtccagcgggtgctggaagccgacagcgcgctggtcggcatcagcgaggcggtcagcaacatcaccgagatgaccacccagatcgccgccgccgcggaggaacagagcgcggtggccgaggaaatcaaccgcaacatcagcaccatcgccgccctggccgagcagacctccgacgaggcgctgcgcacggcgaaactgagcgaggaactgaccaccaccgcgcagagccagtattccctggtcgagcgcttcaaccgctgagatcaggccgcggggagggagctccccgcacctgccgtcacttgaagtcccattgcatctgcgccgggatgctcaccgcgcttgacgactgcacgcagacgtcgaggtagtcggtgaagcgcggcggcgcggagatcccctcctcaagcagacggctgttgtcgaacaggtagttgaggtcggcaaagccgctgtacaagcgcaacgcgcgcaggaccagacgcggattggccgggccgatgcgcgactcgaagctcttcgccagttccttgaggtcgtccacctccaccttgcggtagcgctcgcctaccggcgccgccccgttggcgcgggcgaaggcctcgtcgatctcgccgaaggtgcaggccgcgcgatggccggcggagatatgatagaggctgtgccccaggcacggcttcagcgccaggccgatcagcgcctcggcgcagtagtcgaccggaatcacgtcgatctgctcgtccaggccgcaggtgaagctttccagggcgaagcccatgcggaagacccagaagatgctgccggaggcctggcagccaagggtacggtggcccaccacgatggatggccgcgccaccaccaggggcaggcccggcagttcctcgcgcatgcgccgctcgatttccgccttggacgcggtgtagtccaccagttgctgctccgccgccgggaattcccaggactcgctgatcggcgactctcgctgcggtccgcagcacatcgcggtaccgacgtggaggaaacgcttcagtcgcttcgaacggctcagcacgtcggcgaaggcgaaagtgccgtcgacgttgaccggccagatggtcgggttcttcgagaacgacgccacggcggcgcaattgatcacccgctccacctgcatcaggcgcggcgtctcgcgggccagccaggaggtgtcgaggaaatcgccgcagaggatctgctccgcccgcagtgccaggcagtcggcttcgtcgacgccatgcatcagcaggttgccgcgcaggcgttcgagcccctgctggcgggattcggcgcggaccaggaaggacaggttggcgccgtgcccggcggcgatcagctgggcggcgaccgaaccgccgagaaagccggtggcccccgtcagcaggatgcgttcgcgggtatcgatagcggtgatctgctcaccgtcggcatgcatgttcatgtcttcccccctcagagaagtcagtcgcccacgcctcgatgcgagggtggttgcgccgcagcttatgaggggatgccttaaggaaccgttaatggccctggagcccgcgaaggaagccggccacctcccgcgccgttgccgccaggtgctgctcgtgggtcaggccggaggccttcagcggcttgaggtcgtggtccgccgcggccagccagtgcaggcggatcgtcggcgccagcgcatagcccgccaccgcctcgcggttgcccagggcgtcgcgctcgccctggacgatcagggtcggcgtgcgcagcccggcgaggtgcgcgacccgcggcttctccggcttgccggcggcgtagaacgggtagccgaggcagaccagggcatccgcgcccagctcgtcggccagcaggctggccatgcgcccgcccatcgacttgccgcccagggccaagggcccgtccagggtctcgcggacctgcgcatggactcgccgccagcagtcgagcaactgcgcctgcggattcggcggacgcttgcggccgtcctcgcggcgctgggccatgtagggaaactcgaagcgcgcgacggcgatgccctgggcggcgagcagttcggcgatgcgctccatgaacgggctgtccatcggcgccccggcgccatgggcgagaatcagggtggccgacagcgagccggccgggcggttccatttcagcgacaacttgccacacctcgtatgcagtgggggtcgggaagccaattgatcccgatcaatatttcataacgccccattatccatgcttcctctcgctaattacgccaattagaccagccccaatggggggacgcccggcatcccaactgccggaaaaagccatagcgtataaccgtggatggaagcccatagcatgagcaccactaacccagagtccgcctataactacaaggtggtccgccaattcgccatcatgaccgtggtctggggcatcgtcggcatgaccgtcggtgtcctgatcgccgcccagctggtatggcccgacctgaacttcggcttgccgtggacgagcttcggccgcctgcgcccgctgcacaccaacgcggtgatcttcgccttcggcggttgcgcactgttcgccaccagctactacgcggtgcagcgcacctgccaggtgcgactgttctccgacaccctcgcctccttcaccttctggggctggcaactggtgatcctgctggccgccatcagcctgccgctgggctacacctcgtccaaggagtacgccgagctggaatggccgatcgacatcctgatcacggtggtctgggtcgcctacgcggtggtgttcttcggcaccctggtcaagcgcaaggtcaagcacatctatgtgggcaactggttcttcggcgggttcatcctcaccgtcgccatgctccacgtggtgaacaacctcgagctgccggtgaccttcaccaagtcctactcgctgtacgccggcgccaccgacgccatggtccagtggtggtacgggcataacgccgtgggcttcttcctcaccgccggcttcctcggcatgatgtactacttcgtgcccaagcaggcggagcgtccggtctactcctaccgcctgtccatcgtccacttctgggcgctgatcgcggtgtacatctgggccggcccgcaccacctgcactacaccgcgctgccggactgggcgcagtcgctgggcatggtgatgtcgctgatcctcctggcgccgagctggggcggcatgatcaacggcatgatgaccctctcgggcgcctggcataagctgcgcagcgacccgatcctgcgcttcctggttgtgtccctggcgttctacggcatgtccaccttcgaaggcccgatgatggcgatcaagaccgtcaacgccctctcccactacaccgactggaccatcggccacgtccacgccggcgccctcggctgggtcgcgatggtttccatcggctcgctctaccacctgatcccgaaggtcttcggccgcgagaagatgtacagcctgggcctgatcaacgcgcacttctggctggccaccatcggcaccgtgctttacatcgcctcgatgtgggtcaacggcatcacccagggcctgatgtggcgcgcggtcaacgaggacggcaccctgacctactccttcgtcgaagcgctggccgccggccaccccggcttcatcgtgcgcatgctcggcggtttcatcttcctgctcggcatgttcctgatggcctacaacacctggcgcaccgtcagtgccgccaagccggccgaatacgaagccgccgcacagatcgcctgaggagccgagcatgaaacacgaaatactcgagaagaacgtcggcctgctggcgctatgcatggccgtggccgtgagcatcggcggcctgacccagatcgtgccgctgttcttccaggacgtgaccaacaccccggtcgaaggcatgaagccctataccgcgctgcaactggaaggccgcgacatctatatccgcgaaggctgcgtcggctgccactcgcagatgatccgtccgttccgcgccgaaaccgaacgctacggccactactcggtggccggcgagagcgtctgggaccaccccttcctgtggggttccaagcgtaccggtccggacctggcccgcgtcggtagccgctactccgacgactggcaccgcgcacacctgttcaatccgcgcaacgtggtgcccgagtcgaagatgccggcctacccgtggctggtggagaacaagctcgacggcaaggacatcgagaagaagctcgaagtgatgcgcaccctcggcgtgccctataccgacgaagacatcaagggcgccaaggactcgctgaaaggcaagaccgaaatggatgccgtggtcgcctacctgcaggtgctcggcacctcgatcaagaacaaacggtgacggcaatggatatcgggacgctgcgaggactcggcacgctgctgatcatggtcgccttcatcggtctggtgatctgggcctacagcggcaaacgcaagaagagcttcgacgaagcgacgatgctgcccttcgcagacgatcccgaagccaaaaagcacgtcgagcaagcttctaggagtaacaaagaatgaccaccttctggagtctgtacatcacagctcttaccgtcggtaccttgatcgccctgctctggctggtcttcgccacccgcaagggcgaggccaagggtactaccgaaaagaccatgggccactcctacgacggcatcgaggagtacgacaacccgctgccgaagtggtggttcatgctgtacatcggcaccatcgtcttctccgtcggctacctggtcctgtacccgggcctgggtaactggaaaggcgtactgccgggctacgagggcggctggacccaggacaagcagtgggaacgcgaaatgaacatcgcccaggagaagtacgggccgatcttcgccaagtacgccgccatgcccatcgaggaagtggccaaggacgagcacgccatgaagatgggcagccgcatgttcgccacctactgctcgatctgccacggttccgacgccaagggcgccctcggcttccccaacctggccgacaacgagtggcgctggggcggtgacccgcagagcatcgagaccaccatcctcggcggtcgccacgcgatcatggcggcctggggcgacatcctcggcgaagacggggtgaagaacgtcgccgcctacgtccgcaccgaactcgccgggctgaagctgccggaaggcaccaaggccgacgtcgaggccggcaagcagatcttctcggtcaactgcgtcgcctgccacggcccggaaggcaagggtaccgccctggtcggcgcgccgaacctgaccaaccccggcgcgttcatctacggctccagctacgcccagctccaacaaaccatccgccatggccgccagggccagatgccggcccaggagccatacctgggcaaggaaaaggtgcacatcctggccgcctacatctacaacctgtcgcacaaccagggcagcaactgacccctccccccacccgcgccctcccgggcgcgggtccttcccccggtctcagaccttagtcccaggcggcgcgacgaagtgtcgcaccagcggacgcctttcctacccttccttttcaatcgcgtctaagctgctctgcattcgtccctctccggcagagcgacgggacacctaacttcaccggccgaacccactcgtccggatagcgccagaaagccatacggccgccttggaaagcgctctgaagcaggcatcaaactggcgtcgcccctggcctggcgcgttgcaatgcccacccgctttctccatacttgccgccgattttttgtccctaaaaaagtccattaaccgtggaacccctagcatgagcacagcaatcagtcagactgcttataactataaggtggtccgccagttcgccgttatgacggtggtctggggggtcattggaatgggtctcggtgtcctgatcgccgcccaactggtatggcccgaattgaacttcgacctgccgtggacgagcttcggccgccttcgccccctgcacaccaacgcggtgatcttcgccttcggtgggtgcgccctcttcgccacctcgtactacgtggtgcaacgtacctcgcaagcccgactgatttcagacacgctggcggccttcaccttctggggttggcaggccgtgatcgtgggcgccgtgctgaccctgccgcagggtttcaccacctccaaggaatacgccgaactggaatggccgctggccatcctcctggcgatcgtctggatcacctacgcgatcgtgttcttcggcaccatcgtcaagcgcaaggtcaagcacatctatgtgggcaactggttctacggtgccttcatcctggtgacggcgatgctgcatatcgtcaaccacatgtcgctgccggtgagctggttcaagtcctactccgcctactccggcgccaccgatgcgatggtccagtggtggtacgggcacaacgccgtgggcttcttcctgaccaccggcttcctcggcatgatgtactacttcgtgcccaagcaggccgagcgtccggtctattcctatcgcctgtccatcgtccacttctgggcgctgatctccctgtacatctgggccggcccgcaccacctgcactacaccgcgctgccggactgggcgcagtcgctgggcatggtgatgtcgctgatcctcctggcaccgagctggggcggcatgatcaacggcatgatgaccctctccggcgcctggcataagctgcgcaccgacccgatcctgcgcttcctggtggtgtccctggccttctacggcatgtccaccttcgaaggcccgatgatggcgatcaagaccgtcaacgccctctcccactacaccgactggaccatcggccacgtgcacgccggcgccctcggctgggtggcgatgatctccatcggctcgctctaccacctgatcccgaaagtcttcggtcgcccgcagatgcacagcatcggcctgatcaacgcgcacttctggctggccaccatcggcaccgtgctgtacatcgcctcgatgtgggtcaacggcatcacccagggcctgatgtggcgcgcggtcaacgaggacggcaccctgacctactccttcgttgaagcactggtcgcaagccacccgggcttcatcgtgcgcatgatcggcggtggtttcttcctcaccggcatgctgctgatggcctacaacacctggcgcaccgtgcgtgctgccaagccggccgaatacgaagccgccgcgcagatcgcctgaggagcccgacgtaaatgaagaaccacgaaatactcgagaagaacgtcggcctgctggccatcttcatggtgatcgccgtcagcatcggcggcctgacccagatcgttccgctgttcttccaggacgtgaccaataccccggtcgaaggcatgaagccgcgtaccgccctggaactggaaggtcgcgacatctacatccgcgaaggctgcgtcggctgccactcgcagatggtccgtccgttccgtgccgagaccgaacgctacggccattactcggtcgccggtgaaagcgtctgggaccacccgttcctgtggggttccaagcgtaccggcccggacctggcccgcgtcggcggccgttactccgacgactggcaccgcgcgcacctgtacaacccgcgcaacgtggtgcccgagtcgaagatgcctgcctacccgtggctggtagagaacaagcttgatggcaaggacaccgccaccaagatggaagtcctgcgcaagctgggcgtgccttacaccgacgaggacatcgccggtgcatgtgaagccgtgaagggcaagaccgagatggacgccctggtggcgttccttcaaggcctgggaacctctatcaagagcaaacggtgagtgtgatggatatcgggactctgcgtggactgggcaccgtggtgatcatggtcgccttcatcggcctggtgatctgggcctacagcggcaagcgcaagaagagcttcgacgaagcgacgatgctgcccttcgcagacgatcccgaagccaaaaagcacgtcgagcaagcttctaggagtaacaaagaatgacgaccttctggagtctgtacattacagctctcaccctcggcaccctgctggcgctgacctggctgatcttcgccacccgcaagggccagcgcagcagcaccaccgacgagaccgtgggccactcctacgacggcatcgaggagtacgacaacccgctgccgaagtggtggttcatgctgttcgtcggcaccctggtgttcgccgtggggtacctggccctgtacccgggcctgggcacctggaaaggcctgatgccgggctaccagtccgccgacgaattcgccgacaaggaaaaaggctggaccggcgtccaccagtgggaaaaggaaatggccaaggccgacgagaaatacggcccgatcttcgccaagttcgccgcgatgcccatcgaggaagtcgccaaggatccgcaggcggtgaaaatgggcggtcgcctgttcgcctccaactgctcgatctgccacggctccgacgccaagggcgcctacggcttccccaacctgaccgacgccgactggcgctggggcggcgagccggaaaccatcaagaccaccatcatggctggccgccacgccgccatgccggcctggggtgaagtgatcggcgaggaaggcgtgaagaacgtcgccgctttcgtcctcacccagatggatggccgtaagctgccggaaggcgccaaggcggacatcgaggccggcaagcaggtcttcgctactacctgcgtcgcctgccacggtccggaaggcaagggcaccccggcgatgggcgctcccgatctgacccaccccggcgcgttcatctacggctccagcttcgcgcaactgcagcagaccatccgctacggtcgccagggtgtgatgccggcgcaacaggaacacctgggcaacgacaaggtgcacctgctggccgcctacgtatacagcctgtcgcacggcgagaagagcgccgaataagcgctccctcccccacgacccagacggcgccggcaaccccggcgccgttttattttgtgcaaaagaaaagcgcgaatgggacaatacgcgaccaaaagtcgcacagttaccgcaaaaagcctgatagatcaggcgtataatcagtaggcgtgcaactattttctgaccctgtcggcatgtaccggccgggcgccccccactgccgtggtacgcactgatgagcaaacagattcccgttcaagacgtcaccccgcctgccaagggcgacaccaataacaacgatctctacgccaagcgcgagaagatctacacccgggccttcaccggtatcttccgccgactgcgcatggtgggcggtgcggcgctcttcctcctctacttcggtaccgtctggctcaactggagcggccgccaggccgtctggtgggacctacccgagcgcaagttctacatcttcggcgccaccttctggccgcaggacttcatgctgctgtcctggctgctgatcgtctgcgccttcggcctgttcttcatcaccgtgttcgccggtcgcgtctggtgtggctatacctgcccgcagagcgtgtggacctggatctacatgtggtgcgagaaggtcaccgaaggcgaccgcaaccagcgcatcaagctggacaaggccccgatgagcggcaacaagctgctgcgcaagaccgccaagcacagcctgtggctgctgatcggcctggtcaccggcctgaccttcgtcggctacttctcgccgatccgcgagctgattcccgagctgctcaccggccaggccgacggctgggcctacttctgggtcggcttcttcaccctggccacctacggcaacgccggctggctgcgcgagcaggtgtgcatctacatgtgcccctacgcgcgcttccagagcgtgatgttcgacaaggacaccctgatcgtctcctacgatccgcgtcgtggcgagaagcgcggcccgcgcaagaagtccctcgactacaaggcccagggcctgggcgactgcatcgactgcacgatgtgcgtgcaggtctgcccgaccggcatcgacatccgcgacggcctgcagatcgagtgcatcggctgcgcggcgtgcatcgacgcctgcgacagcatcatggagaagatgaactacccgaaagggctgatcagctacaccaccgagcacaacctcaacggccagaagacccacctggcccggccgcgcctgatcggctacgccatcgccctggtgctgatgatctccgccctgatcaccgcggtggtcctgcgtccgctggtcggcttcgacgtcagcaaggaccgcgtgctctaccgcgagaacgaactcggccgcatcgagaacgtgtacagcctgaagatcatgaacaaggatcagcaggaccacacctacatcctcggcgccaagggtctcgaaggcctgaccctggaaggccggcgcgagctgaaggtggcggcgggcgacatcctcaacctgccgatggaactgtccatcgagccggagaagctgccttctaccaccaacgagatcgtcttcaccatcgagtcggccgacgacccgagcatccataaagaagcgaagagtcgcttcattggcccacgcacccgttgagtaacttgagcatgcagtccgagacccaccctcaaccctggtacaaacacttctgggcctggttcatcgtggccctcctggcgacctcggtggtgctcgggctgagcctggtcaccatcgcggtgcgcaaccaggacaccctggtcaccgacaactactacgaggccggcaagggcatcaaccgctccctggaacgcgagaacctggccgtacgcctgcaggtgcacgccaaggtcaaggtcgacgacctgaccggcgaagtcgaagtgcgcctgaccggcaacagccgtccggatcggctcaccctcaacctgatctcgccgacccagccggagaaggaccgccgcgtggagctgctgcgcagcaactccgaccgcgagcgctacgtcgggcaactgaccgacgccgtcgagggccgtcgcttcgtcgaactgctcggccaggaaggcagcggccagtggcgtcttttcgaggaagaggtggtatcgccgaccgtggtcatggagctgggtgacgaaccgctccagggagcagaagcgaagcgcccatgagcgcccccctgccctgctaccactgcggcttgccggtccccgccggcagccgcttcgaggcccgcgtgctcggcgagacgcgggccatgtgctgtccgggctgccaggcggtggccgaggccatcgtcgccggcggcctggaaagctactaccggcaccgcagcgaaaacgccgccaatcccgaagccttgcccaaggcgctcagcgaagagttgcagctctacgaccgcccggacgtacagggcggcttcgtccgccatgagggcgagctggcggaaaccagcctgatgatcgaaggcatcagttgcgccgcctgcggctggctgatcgagaagcacctgcgccggttgcctggcgtagccgaggcgcggctcaacctgtccaaccatcgcctgcacgtgcgctggcaggacagccagttgccgctcagccagttgctcggcgaactgcgccagatcggctatgccggccatccctaccaacccgaccgcgccaccgagcgcctggccatggagaaccgtcacgccctgcgccagctcggtgtcgccgggctgctgtggatccaggtgatgatggcggtgatggcgacctggccggaattcaacctcgacctttccgccggcatggaccgcatcctgcgctgggtcagcctgatcctcaccacgccgatcgtcttctactgctgcggccagttcttccgtggcgccctgcgcgacctgcgcacccgccacctgaccatggacgtctcggtgtcgctggcgatcggcggcgcctacgtcgccggcatctggtcgacgatcaccggccagggcgagctgtatttcgacgcggtcggcatgttcgccctgttcctcctcgccggccgctacctcgaacgccgcgcgcgggagcgcaccgccgcctccaccgcgcaactggtcaacctgctgccggcgtcctgcctgcgcctggacgccgccaaccagggcgagcgcatcctgctcagcgaactgcgcatcggcgaccgcgtactggtaccgccaggcgccgtgctgccggccgacggagtgatcctcgacggccagtccagtgtcgacgagtcgctgctcaccggcgagtacctgccccatccacgccaggccggcgacgccgtcaccggcggaaccctgaacgtcgaggggccgctgaccgtcgaggtcggcgcccttggcgacgacagccgcctgtcggccatcgtccgcctgctggaacgcgcccaggcggacaagccgcgcctggcggaactggccgataaggtggcgcagtggttcctgctcatcgtcctgctggtcgccgcagcggtcggcgcgctgtggtggcaggtcgaccaccagcgcgccttctgggtggtgctgtcgctgctggtcgccacctgcccctgcgccctgtcgctggccacgcccaccgcgctcaccgcggccaccggcagcctgcacaagctcggcctgctgatcacgcgcgggcacgtgctggaagggctgaaccacatcgacacggtaatcttcgacaagaccggcaccctcaccgaaggccgcctgacgctcaagcaggtgctacccctgcgcgatctcgacgcggatcgctgcctggccctcgccgccgccctcgagaaccgttccgaacaccccatcgcccgcgccttcggccgtgcgccggaggccgccgacagcgtcgcaagccatccgggactgggcctcgaaggcctggtggaaggccgccgcctgcgcatcggccaggccgccttcgtcagcaacctgggcggcagcgccacgcccgcgatgcccggcgactccggacagtggctgctgctcggcgacgagcagggaccgctggcctggttcggtctcgacgaccgcctgcgcagcgacgcccccgccctgctcgccgcctgcaaggcgcgcggctggcgcaccctcctgctatccggtgacgcctcgccgatggtcgccagcgtcgctgccgaactgggcatcgacgaagcccgcggcggcctgaccccggacgacaagctggccatgctcgaacgcctgcacggcgagggccgccgggtgctgatgctcggcgacggagtcaacgacgtaccggtgctcgccggtgccgacatcagcgtcgccatgggcagcgccaccgacctggccaagaccagcgccgacgcggtgctcctgtccaaccgcctggacagcctggtgcaggctttccggctggcgcgccgcacccgccatatcatcatcgagaacctggcctgggccagcctgtacaatggcctggtcctgcccttcgccgcgctcggctggatcaccccgggctgggcggcgatcggcatgtcggtcagttcgctgctggtggtggtcaacgccctgcggctgacccgaatcccttcgccgaggtccgtatggccgcgctctacatcctgatccccgtcgcgatcgtcatcgtcgccatcgccatctacgtgttcttctgggcggtggacagcggccagtacgacgatctcgacggccccgcccacagcattctcttcgacgacgaagacccgaagcaccaggccggcgtcgacgaagcggagaagccgtcgaaacccgaggaccgaccgcgtggctgaactggcgccgctgctggtttccgcgctgatcctcggcctgctcgggggaggccactgcctgggcatgtgcggcggcctgatgggcgccctgaccctggccattcccgccgaacagcgcggccgtcgtctgcgcctgctgctggcctacaacctcggccgcatcctcagctacgcctgcgccggcctgctgctcggcctggccggctgggcggtggcgcgcaccccgttggccggcgcgctgcgggtggtcgccgggctgctgctgatcgccatgggactctacctggccggctggtggagcggcctgacccgcgtcgaggcgctcggtcgcggcctctggcgccacctggaacccttcgcccggcgcctgctgccggtctccagcctgccacgggccctgctgctcggagcgatctggggctggctgccctgcgggctggtctacagcaccctgctctgggccaccagccagggatcggcactggacagcgcgctgctgatgctggcgttcggcctcggcacctggccggttctgctggccaccggcatggccgccgaacgggtgaccgccctgctgcgccgtcgcggcgtacgcatcgtgggcggcctgatggtcatcctcttcggcctctggaccctcccaggaccgcaccaggcctggctgatggggcattgacggacgcccgtcccaacatcgggcgacacatcctgtatacattcacccgcttgatacaaatcaacaggccttcccggcgcaatccctagacttcccgactaaagctcgccaactggggatctctggcatgctcgacaccattcgctgggacgctgacctgattcggcgctacgacctttccggcccgcgttacacctcctatccgaccgccgtgcagttccacgaaggcatcggcccgttcgaccagttgcacgccctgcgcgacagccggaaggccggacaccccctgtcgctctacgtgcacatcccgttctgcgccaacatctgctactactgcgcctgcaacaaggtgatcaccaaggatcgcgggcgcagcgcgccgtaccttgcgcgcctggtccgcgagatcgagatcgtcagccgccacctctcccgcgagcaggtggtcgagcaactgcacttcggtggcggaaccccgaccttcctcagtcccggccagttgcgcgaactcatgtcgcaattgcgcacccacctcaacctgctggacgacgattcgggcgactacggcatcgagatcgacccgcgcgaggccgactggtcgaccatgggcctgctccgcgaactcggtttcaaccgcgtcagcctcggcgtacaggacttcgacatggaggtgcagaaggcggtcaaccgcatgcagaccccggaggagacccgtaccatcgtcgaggccgcgcgccccctgcaataccgctcgatcaacctcgacctgatctacggactgccgaaacagacgccggacagcttcgcccgcacggtcgacgaagtgatcgcgctacagccggatcgcctctcggtgttcaactacgcccacctgcccgagcgtttcatgccgcagcggcggatcaacgccgacgacctgccgagcccgggccagaagctggaaatgctccagcgcaccaccgagcaactcgccgcggcgggctaccgctatatcggcatggatcacttcgccctgcccgacgacgagctggccagcgcccaggaagacggcaccctgcaacgcaatttccagggctacaccacgcacgggcactgtgacctggtaggtctcggggtctcggcgatcagccagatcggcgacctctacagccagaacagcagcgacatcaacgactaccagaccagcctcgacaacggccagttggcgatccgtcgcggcctgcactgcaacagcgacgaccgggtgcggcgcgcggtgatccagcaactgatctgccacttcgaactggccttcgaggatatcgagacagagttcggcatcgacttccgcagttacttcgccgagctgtggcccgatctcgaacgcttcgccgccgacggcctgatccgcctggacgccaagggcatcgacatcacgtcttccggacgtctgctggtgcgttcgatctgcatgctgttcgaccgctacctgcccagcctcaaccggcagcgcttctcccgggtgatctgaaagcgcaccgccctgcccgcacgacagggcggtgaatccccgccccttctaccggctgcccatgaccttcatgatcagcgccgggtcgctgatgtccatctccttgatggccgatgccatcgctgccgtcgccgtctgcagggcggagttgagttgttgcagctccttctgcaactcaggcacgcgagcctccttcgcccccggatcggacgacctcatggcctcctgcagctccctgagcttctcttcgatcttcttcttcaactcgcggatcatcttcaccatcggccgcaactcctgcgggatatcctcgtcctcctcctccaccggcacccccatggtagcggccagctcgcgccctgcctgggaaagctgtacatgctgatcggcggcgtcggtgccggcggccgggtcttccgcctgctcggcggtgccggtccgcgcggccttggcgtccgcggcggcgcgcgatgagggcggcacctgggtggtgatccagccactgagggtcaacattccagtcactccgggaaaaatggaattcttccattggatcggcccacgcgtcgcgaacttgagcccccttttcgtcgccccttgacagggtgcgacaggtagtcgcagttgtttgacgcaagtcactgattggaaacgccatcggcctgtcagaaatggtcgttgccagacctatggctggcacccgcatcgcggctgcgttacccttactcctgttgtgcctttaacctagcaaggacccctcaatggccgaaaccatcaaggtgcgcgcactgccccaagcacactgcaaggattgcagtctggccccgctgtgcctccccctgtcgctgaccgtggaagacatggattcgctggacgagatcgtcaagcgcggtcgtcccctgaagaaaggcgaattcctgttccgccagggtgatcctttcggctcggtctttgccgtgcgctccggcgccctgaaaaccttcagcatcaccgatgccggcgaagagcagatcaccggcttccacctgcccagcgagctggtcggcctgtccgggatggataccgagacctatccggtatccgcccaggccctggaaaccacctcggtctgcgagattcccttcgagcgcctggacgaactgtccgagcagctgccgcaactgcgccgccaactgatgcgcctgatgagccgggaaatccgcgatgaccagcagatgatgctgctgctgtcgaagaagactgccgacgagcgcatcgccaccttcctggtcaacctgtcggcgcgcttccgtgcccgtggcttctccgcccagcagttccgcctggccatgtcgcgcaacgagatcggcaactatctcggcctggccgtggaaaccgtgtcgcgggtcttcacccgcttccagcagaacggcctgatcagcgcggaaggcaaggaagtgcacatcctcgactccatcgagctgtgcgccctcgccggcggccagctggaaggctgaagcgcctgcgaaccgccaacgggcccgcctcagcgcgggcccgttgtatgatgggccccgaaaaacgcccagcccaggatcttccatgattttcgacgagttcaccctcaagtcgcagatccgcgccgtgccggactttcccaagcccggcgtggtgttccgcgacatcaccccgctgttccagtcgccacgcgcgctgcgcatgaccgtggacagcttcgtccagcgctacatcgaggccgatttcagccacatcggcgccatggatgcccgcggcttcctcatcggctcggcggtggcctatgcgctgaacaagccgctggtcctgttccgcaagcagggcaagctacccgccgacgtactcgccgagggctaccagaccgaatacggcgaggccttcctcgaagtacatgccgacagcctctgcgaaggcgacagcgtactgatcttcgacgacctcatcgccaccggcgggaccctgctggcggccgcgagcctggtacgacgcctcggggccagggtcttcgaggccgcggcgatcatcgacctgccggaactcggcggctccactcgcctgcaggacgccggcatctccaccttcagtctcaccgcgttcgctctcgacgagcgttgatacgccggggggcgccctggcgccccgcgctcgctccttgcgccctatcttccgtctggtcgagccgacctggccattaatgacttcgaaatggccagaaatgacctcccgctgttggacaatcctgcaataattacatcagctaatgacacattcagaggtgttatagcgaactcgccatagggaacccgaggaaacctgtgcgtttcccctccccagaacaacaaaaggagttagccatgactgccactggcaccgcctccccggttcgcgccaatttccccgtgcggcggatggatttcagcttcagcgaaaccccgaagtactggtgggacggccaacccttcatgacccagttcatgaacaacctgtcctcgctcttcccctacggcgaaaaattcttcgtcgatagcgtccgcgcggtgcgcgaccgcctggaggatccgcaactgaagaaggacgtcagtgccttcatcggccaggaggcgatgcactccaaggagcatgccgcctacaacgaatatgccgaggagcacggggtcgacctggagtgcctcgaactgcggatcaaggtcctgctggaaaacgtcagcaaggtcaccaccaggaaacaccagttggcgatcacctgcgccctcgagcatttcaccgcgaccatggccgcgcagctgctcaagcgcgaagacctgaccatccagatgcagtcgccgaagatgtacaagctgtggatgtggcatgccatcgaggagaacgaacacaaaaatgtcgcctacgatgtgtaccagaaagtctacggcggctacttcacccgggttctggtgatgatgctgaccaccctgatgttcttcggcgtcatcggctggttccagctcgacctgctacgcaaggacggccaattgttcaactggcgctcctggaagcatggcctgggcaccctgttcggcctgcgcaagggcttcttcacccgcctgctgctgccctacctggactactaccggccgggcttccaccccagcgaccacgacaccgcgaaactggagaaatactggaaggacaaactggccttcgccgattgaagcccgcctccgccagtgccgctccgcccccgacgccaggccccgcctggcgtttcttattcgagagaagaacaggatattgcacacggaaaagcctccgtttcgactaccgttcctgaatccgccattttacggaggaaataattagtcaattcctatcgattggctttttacgatgccctgaggtaatatcatgttcattatgttgaacactaaggcattacctctccccacttcccgtctggtctctcgcgagcgtcactggaccggcgacctctagctccctccctcgacacctgctgtcggtggcgaccgcccctgcgcttcggggtctttcccgcccctcgccaccgctcttcgtcatctttggccgcggcctccattccgcggtgcccatgggagggcaacatgcgttcctggatctatctgttactggctatcggcgccgaagtgatcggcaccacctcgatgaaactggccgccacccacgcccctgtcgcaggcatgctgctgatgtacgggatgatcggcctgtcctatttcttcctcgccctggcggtcaagcgtgtccccgtcggagtcgcctacgccctttgggagggcattggcatcgtcctgatcacggcggtcagcgtcgcctggctgggcgaaagcatcggcctgtacaaggccgtcggcctcggcgtgatgatcgccggcatcctgctgatcaagtccggcacccgcaacgccagcggcacgccggcgcagccccgtggggaggccgtcacatgctgaccctgaactggattcccttcgcctggctcggcctggcgatcgccctcgaggtcgtcgccaacctgctgttgaaatactccgacggtttccgcaggcgcggcctcgggatcgcctcgatcctctgcgtgatggccgccttcaccgcgctggcgcaggcggtgaaggacatcgagctgtcactcgcctatgcgatctggggcggcttcggcatcctcgccaccgtcgccatgggctgggcgctgttcggccagcgcctggcctggcgcggctggctcggcctgttgctgctgctggccggcatgagcctgctcaagctggcctgacgcctcggcgtccaacgaaacgcccatcatctgcaggaccgcggcgccggtgaacaacagcagtatctgttcctcacccagggcgcagatttcccgacgccgctccggctggccgatatagtccagcgacaactgaaacagctggcggccgatcaggctggagaggcgacggatggtcgcctcgctcaccgccggcaacaacctgaattcgatgatgtcctccgacatgtcctcggcgaactcatccatgatctgacgcagggcaccacgcagcaccggcgaagccccatgcagttcgcgcacgccgacgatgaacgcggcgggattgctctccacgaagtcgaagaacagccgcaccgtctcccggcagacccgccgccccctttccaggtccagcccgaacggcgtcgtctgcgctcgggcgctgggcgccgcacgagtcgcggcctcgcggcgaagctggcgcagcggctggcgcagctgggtagagatgtcgcggatcatggtcaggccaagatcgtcgatatcgcggaaatgccgatagaaggtgttcggattcaggcccgcctcgcgcgccagctcgcgcaagccgatggcccccaggctgcggctgctgctgcccaggcgcaaggccgcctccagcaaggcgcgtttgccgggagcgtcggcaaccctgtccttcgtttcgttcatatcgctcatgttccacctggttgtttccatgcgccacaagttcggccgttgcgccgcgccgaccctacctaaggttggcttgaccctgaagtatacagatgtctacattcgcaggtagacgagtgtatacgccagcaaacaatcataacaggagcttggccatgagtacccaacccacccctgccgccgcccggcactgcaaggtcgccatcatcggcaccggtttctccgggctggggatggcgatccgtctccgccaggaaggcgaggacgacttcctgatcttcgaaaaggacgccggcgtcggcggcacctggagagtcaacaactaccctggctgcgcctgcgacgtgcaatcccacgtctattccttctccttcgaagcgaacccggagtggacgcggatgttcgcccgccagccggaaatccgcgcctatctggagaagtgctgggaaaaataccgcttgcaggaaaagaccctgctgaacaccgagatcggcaaactggcctgggacgagcggcaaagcctctggcacctgcatgacgcccagggcaaccattacaccgcgaacgccgtggtttccggcatgggcggcctgtccactccggcctatccacgcctcgatggcctggagaacttccagggcaaggtcttccattcccagcagtgggaccatgactacgacctcaagggcaagcgcgtggcggtgatcggcaccggcgcctcggcgatccagttcgtcccggagatccagccgctggtggccgcgctcgatctctaccagcgcactccgccatggatcctgcccaaacccgaccgggcaatcagcgaaaccgagcgccggcgcttccggcgcttcccgctggtgcagaagctctggcgcggcggcctctacagcctgctcgaagggcgggtgctgggcttcaccttcgccccgcaggtaatgaagctggtgcagcgcctggcgatccgccacatccacaagcagatcaaggatccggaactgcgccgcaaggtcacgccggactacaccatcggctgcaagcgcatcctcatgtcgcacaactactaccctgccctggctgccgccaactccacggtgatcaccgaaggcatctgcgccgtcaccgccaatggaatcgtcgacggcaacggccgggaacgcgaggtcgacgcgatcatcttcggtaccggcttcaccgccaacgaccctatcccccgcggagtggtcttcggtcgcgacggccgcgacctgctggacagctggaccaagggcccggaagcctacaagggcactaccaccgccggcttccccaacctgttcttcctgatgggaccgaacaccggcctcggccacaactcgatggtctacatgatcgagtcgcagatcgcctacgtcctcgatgcgctgaagctgatgaagcgccgcgaactgctcagtctcgaggtcaaggccccggtgcaggaacgctacaacgaatacctccagcgcaagctggaccgcagcgtctggagcgtgggcggttgcaagagctggtacctgcatccggtcagcggccgcaactgcaccctgtggccgggattcacctggcgcttccgtgccctgacccggcagttcgacgcctccgcctaccacctcaccacgacaccgctcgccgccctgagcaacgaagcccgccaacaggccgaaggggtacccgcatgaagtcgttcgaaaacaaagtcgccgccatcaccggcgcaggctcgggcatcggtcgcgccctggccgtggagctgggcaggcagggttgtcacctggccctggccgacgtcaatgccgcagctctcgaggagacccgccaattgctcgccagcagcggggtacgcgtctccaccgcggtcgtcgacgtggccgaccgcgagcaggtgcaggcctgggccgacaaggcggccagcgaacatggccgggtgaacctgatcttcaacaacgcgggcgtcgcccacgccggtaccgtggaaggcagcgactactcggaatacgagtggatcatgaacatcaacttctggggcgtggtgaacggcaccaaggcgttccttccgcacctgaaggcctccggcaatggccacgtggtcaatgtctccagcgtcttcgggctgttcgcccagcccggcatgagcgcctacaacgccaccaagtacgcggtgcgcggcttcaccgagtcgttgcgccaggaactggacatggagggctccggcgtctccgccagttgcgtgcatcccggcgggatcaagaccaacatcgccaagaccgcgcgaatgaacgagagcatggccaaggtcaccggccaggctccggacaaggctcgccagcaattcaacgaccagttgctgcggaccaccccggagaaggccgcccaggtcatcctgcgcggcgtgcagcgcgacagccggcgcatcctgatcggcaccgacgcccacgcgatcgacgtgatgctgcgcctggcaccagtgctctaccagcgcctggtcaccgccagcatgcgcctggcagcgcgcttcgcgccgcgcccgaagagcccccagggcgcccgcgaagccagcgagtgaacaggcccgccgggtagccgctaggctgcccggcacgtcatactcgacggccagtctccagggtacggccgtcatgaaccctccccttcctcacttccgctaccatcccgaaccgctcgccagcggcagcatcgaggcttccgccactacctgccagtgctgtggcaaggctcgtggctacgtctacaccggttcgccctattcccgccacgagttgccgcccggcagcctttgcccctggtgcatagccgacggcagcgcggccgcgcgctacgaagcgagcttttccgacgactatccgctgctcgacgccggcgtcgccgcggatatcgtcaccgaagtctgcgagcgcacgcccggctacacctcctggcagcaggagcgctggctggtttgctgcgaggatgcctgcgcctttcgcggcgacgcggggcgtgaggaaatcgggcaactgggagccgagggcctggcgcagcgcttcgccgatttcgcctggccggctatcacctggcaacgcctcgtcgacgcctatacgcccggcggcaatccggccatctaccgcttcgactgcctgcactgtggccaggcgcattacgacctggacttcacctgatagaacgcggccctacaaccccatctgcttgccgatgatctcgttcatgatttcccgcgaaccgccgccgatggagagaatccggttgtcgcgatacagccgctccaccaggctttcgcgcatgtagcccatgccgccgagcacctgcacggcatcataggtcaggcgatcggcgacatcggtggcgaagttcttggccatcgatatctccttgatcacgctcttgccggcggccatcttcgctgcctggcgataggtgaactcccgggaaacctccagttgcgtggccatttccgcgagacgatggcgcagcacctggaacttgccgatcggcttgccgaacgcttctcgctcgcgcgcccagcgcagcgactcctccagagccagttgcgcggtcatgttggccatcaccgccagggccaggcgctcgctctggaaattggccatgatgcaggcgaagccggcattctccacgccgatgaggttttccgcaggcacccggcagtcgtcgaagaacagttcggcggtatccgacgcccaccagcccatcttcttcagcttgcggccgacactgaacccggcagtgcccttctccaccagcagcaggctgatgccggcgaaaccctcgccgccggtacgcaccgccaccgtgtagtagtccgcgcgcacgccgctggtgatgaaggtcttgctgccgctgacgcgatagtgatcgccatcgcgcaccgcacgggtcttcaggttggccacgtcggagccgccagagggctcggtgaccgccagggccatgatcttctcgccgcgcagcaccgccggcactacccgctcgcgcacctcgggacgggcccacttgaccaccggaggcaagccgatatccagcgatcccaacccggcgaccaagccgccggaaccgcagcgcatgagctcttcgctggccgccaccttggcgaacagatcgccttcgcaactgccgccgtaggcttccgggtagccgatgccgaggatcccggccgcgccggccttgagatagagttcgcggggaaattcctcggcctcctcccattcatcgatgtacggcaacacctcgcgctcgacgaaacggcgcaccgaatcccggatcagttgatgggactcgtcgaagtactgctggaagtcagtcatggccgggctcctgatgggagcctcagaacttacctagcgcttgcttggttttcaatacgggaaactggccatcggcgagggcgtataggccgcccgtcctacggatacgggaggcacagagctcaggagatcggccgccgtccggccagggcgtgggccaaggtgccgccatcgaccagctccagctcgccgcccagcggcacgccatgggcgatacgcgacaaggtcaggccgcggccggccagtagctgggcgatatagtgggcggtggcctcgccttcgacggtggggttggtggcgaggatcacctcgctgaaggctccgtccctgatccgcgcttccagttcgggaatgccgatcgcctccggccccaggccgtcgagcggcgacaggtgtcccttgagcacgaaatagcggccgcggtagccggtctgctccaccgcgaatacgtccagcgggccttccaccacgcagagcagcgagtcgtcgcgtcgcgggtcggcgcactgcgggcacaactcctcctcgctgagggtacggcactgccggcaatgaccgaccccttccatcgcggcggtcaacgcctgggccagcttcaggccgccgctgcgatcgcgctccagcagcatcagcgccatgcgctgggccgacttctgcccgacaccgggaagaatgcgcagggactcgatcagttggcggatcagcgggctgaaactcatgcaggactcgtcggatagagggaggggaatggctgccgggcgccgtccgaagaaggcggacccggcacgaacgcgggatcagaagggcatcttgaagccgggcggcagttgcatgcccgaggtgaagccggacatcttttcctggttgttctgctcgatcttgcgcaccgcatcgttgaccgcggccgcgatcaggtcttcgaggatttccttgtcttcctgcatcaggctgtcgtccaggctgacgcgcttgacgtcgtggcgcccggtcatcaccacgctgaccagaccggcgccggattgcccggtcacttcggcgttggccagttcttcctgcatcttctgcatcttttcctgcatctgctgcgcctgcttcatcaggccggccatgccacctttcatcatgttcttcacctcgaatgtcgtcttgttgcgtgcgccaagcgccggtcaggccttggcttccaaaggttcgatggtaccgtcacggaccaccgcggcgaactgctcgcgcaactgccggaccaacgggtcggcatcgatcgatgcctcggccgcccgctggcgctcggcacgccggcgtgccgctgcctgagccggggtctcctgctcaggcttctgcagggtcacctccagtttgagggtgcgccccaggtgctggttcagcgcatcgttcagccgccgctgctgggtggcgttgaacagcgcgctctggcccggatcgagatgcagatgccagtggtcgccgtcggcagctaccagcgtacagttggcaccgatgctggcggtcaggccgccgaggccgagccgcgggaacagctccagccactccgcggccaggccggtggccggcttcgccgccggcagcggctcctccaccacgaccacgtcaggctcgggcgcggcatccaggtaggccagggtatccatgtcgacttcgtagtagtcgtctgcgggcggtggctcgtcgtcctgctcgtcctgctcgtcaggtgctaccggcaacgcagccggcagggcttccagaacggtttccaccaccgcctcgaccgccactgccggagggaccgagggagcctccacggctagcggctcgggctcgggctcgggctcgggctcgggctcgggctcgggctcgggctcgggctcgggctcgggctcgggctcggcagcgaggctcggcgccggctcttcccagggcaagtcgacgacctctgccgcggcggcgggctcttcgacaaccgcttccgtgacgcgcgcctcgaccgccgccggcggcgcggatggcgctgccggcggggcagccggggcttcgacgggcgcagccacgacaggcgcgggagcaacggtagcgaccggcgcaggcgaggccgcgccggccacgggggagttggcgggatcagtcgtggccttgctgatccccaggtcctttagcggcgtcctcggcacgccgtcggcgtccgccgggcggaacgcgagcatccgcagcaacaccatctcgaagccgctacgcggatcgggcgccagcggcaggtcgcggcggccgatcaggcccatctggtaatagaactgtacgtcttccgccggcaacgcctgggccagggccagcacccgctcgcggtcgccctggccattgtcgatcgcttccggcagggcctgggcgatcgcgacgcggtgcagcacgttgagtatttcggcaagcacgccgccccagtccgggccctgctcggccaggtggcgcaccgcttcgagcagggcgcgcgcatcgccctccagcaaggcctggagcacgccatagacctggccgtgatcgagggtaccgagcatcgcccgcacgtctgcggccagcaccttgccctcgccgaaggcgatggcctggtcggtcaggctcatggcgtcacgcatcgagccgtcggcggcgcgcccgagcaaccacagggcgtcatcctcgaagggcacgttctcggctccgagcacgtgggtcaggtgctcgaccacccgctccggcggcatgttcttcagggagaactgcagacagcgcgagaggatggtcaccggcaacttctgcgggtcggtggtggccagcaggaacttgacgtgcggcggcggctcctcgagggtcttgagcagcgcattgaaactgtgcgacgagagcatgtgcacttcgtcgatcaggtagaccttgtagcgtccgcgggtcggcgagtactgcacgttgtcgagcagctcgcgggtatcctcgaccttggtccggctcgcggcgtccacttcgatcaggtcgacgaagcggccttcgtcgatttcgcgacagaccgagcattcgccgcacggcgtggagctgaccccggtctcgcagttcaggcacttggccaggatccgcgcgatggtggtcttgccgaccccgcgggtaccggtgaacaggtaggcatggtgcagccgctggttgtccagggcgttgatcagagccttgagcacatgggtctggccgaccatttcacggaaggaacggggacgccatttacgcgcaagaacttgataactcatcgaaaaccgtcgcagaagggaagcacaagtcggccaatgctagcgcaatttaccccttctgcgctcgccgacttggcaaactgcgtgctaagaattcccctggcccttcagcagccctcgtcggtggcaatgactctaccttccctgacatcgttcatgcctcatttcggcgcacctgcgctgctcctgctgcagttgctcgcggccctgccagcgacggccgcggagaccgacgcgacgccattgcgcttctcggtgatggaaagctggagcatgccgttggtccgcctgcaacggggccagccgatcgacggcatcgtctacgacatcacccgctcccttgcccggcaggtcggccgcaaggcgctctaccacccctacccgcgcgggcgcatcgagcaggcgatgaacgctggcgaaatcgatgtccgctgctacatcagccccgcctggctcagccacgacttccccggctatcgctggagcgtcgcgctgctggtgcaacgcgacatcctggtcgcccgcgaaggcttcgcgccgattcccgaggcgctgccggcccagcatatcggtaccgtccttggctacagctatccccgcttgcaagcgctgttcgacatcggccgactgcgccgcgacgatgcgcgcacccaggatctggtgctggaaaagctgcgcgccggccgctaccgctacgcggtcagccatcaactgtcgctgcactggagcaaccgccaggcgccggggcagccgccactccaggaagccgcgcagctcgaagagacggcggtgagctgcatggtgcgggactccgcagaggttccggtggaagcgatactgaagacgttcgaggaaatgaagcgcagcggagagatcgaggagatactgcagcgctaccgataagagcggcggcggcgtgcggaaaatggcgggcctgaaatggaggcggccccgccagccacaccccggcacacgatgttcccgctgtggctgcttccttccggacctgaccaggttgacgggtaatcgttgcggggggaccgacagggccaccattgcagcctaccctcgggtaggccgcgccattctaccggcttgcgcgtaagttacaaccacttcaagcacttacgtttgcaatccatttcgcgaaagcggttcattgctgctggatcagaccctccggcggcggctgggtcgatacgctcagctcggtatcgacatacaggtccagggtgccccagcccggcttggtgctgaacgacgcatacttctcctcaccgcgatggaaggagaaggcgatccggtaatcgctgccgccgaacagcttcaccggaaactcgcggacctggccgggccggatctccccggagaaagtttccacgccctgctccttgtagctgtaggcgatcggcgccgaagcctggccactgtaatgcagcaggatgcgcggccgctcgctccaacccacgtaggcgccgaacagcaccaccaatgcgagcacgcccagcaaccgctgctttcttgccttgtccatcgttaactccagtcttcggaaatctttcgcagcagcgccgccgcttcagcgggcgacgccgtgctcgtcgaacagtttcagcaggccgtcttcgtcgagcaccttcacgcccagctcgttggccttggccagcttcgagccggcgccgggcccggcgaccacgcagtgggtcttggccgacaccgagccggccaccttggcgccgagcccttccagcttgtccttggccacgtcccggctcatcgcctccagggtgccggtcagcacccaggtctgcccggccagaggcaggccttcgaccgccttgcgctcgctctgccaatgcatgccgaactcacgcaactgcgcctcgatggccagggcacgctgcacgttggccggctcgtcgaagaaatcgcgcaggcttttcgccgctcgctcgggcagacgctccacctggcgtagatcgagccagtcggcgcggatgatgccgtcgagcgaaccgaagcggctggccagcttttccgcgccggtggcggcgatgaagggaatgttcagcttgtcgatgaaaccggccagcgaggcacaagcggcgaactccgcggcgacctcgccctcttcctgcaactgcacgccatgttcggcatcgcgcaactgggcgatcacctggcggttgtgctcgtcggcgaagaagttgtggatctcgtaggccacctcggcgccgacgtccggcaggtaggtcaacacttccggcagcgccttgccgatccgctcgagcgaacccagcgaacgcgccagcagcttggcggtttcctcgccgacgtcgggaatccccagggcgaagatgaagcgcgccagcgaaggcttgcggctgtcggcgatggccgccagcaggttgttggtggacagctcggcgaacccttccagctcgaacacctgttcataggtcagggtatagagatccgccggcgaggcgaccagcccgcgatccaccagttgctcgacgatcttgtcgccaagaccgtcgatgtccattgcccggcgcgatacgaaatggatgatcgcctgcttcaactgcgcctgacaggagaggcggccgacgcagcgatagatggcgccctcgctgatcgactccttgcccttgctgcgcttgaccaactgggtccgctccacggccgagccgcagaccgggcaatgctcgggcacctcgatagcctgcgcatccgccgggcggcgctcgagcaccacctgcatgacctgcggaatcacatcgccagcacggcggatcaccaccgtatcgccgatgcgcaggcccaggcgggcgacttcatccatgttgtgcagggtcgcattggacaccgtgacgccggccacctgcaccggcttgaggcgtgccaccggggtcacggcgccggtgcggccgacctggaactcgacacccagcagctcggtcaactcctcgcgcgcggggaacttgtgggcgatcgcccaacgcggctcgcgcgcgcggaagcccagttcgcgctggaaggcgatgcggttgaccttgaacaccacgccgtcgatctcgtaggccagcgcatcgcgtcggcgaccgatgtcgtcgtagtagtcgcggcaggcctgggcgcccttgaccaggcgcagctcgcgactgatggggataccccagccgcggaacgcctcgaggatgcccacctgggtgtccggcagcgtcccgctgacctggccgaagccgtaggcacagaattccagcgggcgactggcagtgatcttcgaatccagctggcgcaggctgccggccgccgcgttgcgcgggttggcgaaggtcttgccgccggtttccacggccttggcgttgagcgcctcgaaaccggccttggacatgaacacctcgccgcgcacttcgaggatctccggccagccttcgccgtgcagcttcagcggtacgttgcgaatggtgcgtacgttgctggtgatgtcctcgccggtgctgccatcgccgcgggtggcgccgcgcaccagttggccacgttcgtagagcaggctgacggccaggccgtccagcttcggctcgcaactgtactcgacctccgcgccaccgccgagcaggtcgccgccaggcaacaggtcggccagtccttcgcgtacgcggcggtcgaagtccagcaggtcctgctcctcgaaggcgttgccgaggctgagcatggggatctcatggcgcacttcgccgaacgccgaggccggcgtgccgctgacccgctgggtcggcgagtcgggcgtcagcagttgcgggtactcggcctccagcgcctgcaactcgcggaacaggcgatcgtattcggcgtcgggaatgctcggttcgtcgagcacgtagtaacggtaattgtgggtgtccagttcggttcgcagttgcgcgatgcgttcggcggcagcctgggtgtcggtcatggtgggagtccgtgaaacgaaaagagcagcctcggctgctctatagagtagttcgccccctcccgtacgaagaaagggggtgtggccggatcagcgcttctgcatcaggctgcgacgctcatggtcgatgatgcgctggcggtagtgctcgatggtctgggcggtcaacacgctgcgctgctcgtccttcagctcgccgttcagctcgtgggccagcttgcgcgcggcggcaaccatcacgtcgaaggcctgcttcggatggcgcggccccggcaggccgaggaagaagctcacggcgcgggtgctgaagttgtcgatgtcgtccaggtcgaaagtgcccggtttcaccgcattggccatggagaacaggatctcgccattgccggccatgctttcgtggcgatggaagatgtccatgtcgccgaagcgcaggccgctctcgaggatgttctgcaacaatgccggccccttgaagccgctctcgtcgcgggcgatgacgttgatgatcagcacctcgtcgaccggggcaggttcggcagcaaccgcaggggctttctcccgctctttctccttgcggcccttcgacttgcccttgcgcggctccaccgtctcggcggcatcgctcgggtccgcctccagggccagcccctcgtcgaggtccagatcgccctggcgcggctcttcctggcgcttgccgcccttgcgttccttggcttcgcgggcgctgacgctgggcaggtcctgttcgtcgaaggatggctcgcgatgctcgaccacgcgcgccggccccagcagttcagccgagtcgccgtcgtcgtccggcagattggcgaaactgcggtcgagcttgaacttcaacttgcccttgccgccccgcatccgccgccaaccgtcgaagagaatgccggcgatcacgataagcccgataacgataagccattcgcgcagaccgatatccatgtaattccgtagcccctagtgaaaatggtgaataaaaaatgaaaaaaggacgtcctgtcccttgaaacgtggagccaaccttgttctgacagaactttcccacgcgatacaaaaagtggccattaaactaacatgcccatgcacaagtttacactgcctgacactcaggcttcagccaatgcgaccgcctcttccacgtcaactgcaacaagccgtgaacagcccggctcatgcatggtcacgcccatcaactgatcggccatttccatggcgatcttgttgtgggtgatatagatgaactgcaccttttccgacatctccttcaccaatcgcgcataacgtccgacgttggcatcgtccaatggcgcatcgacttcgtcgagcatgcagaacggcgccgggttcaactggaagatggcgaataccagcgccagcgcggtcagcgccttttccccgccggacaacaagtggatggtgctgttcttcttgcccggcgggcgcgccatgatcgccacaccggtatcgagtagatcttcgccggtaagttccagatatgccgtaccgccgccgaataccttcgggaacaatgcctgaaggccagcattgatctggtcgaaggtttccttgaaacgattgcgggtttcccggtcgatcttgcggatgacgttttccagcgtctccagcgcttcggccaggtcgtcgttctgcgagtccaggtagcgcttgcgctcggactgctgctggtactcctcgatcgccgccaggttgatcggccccagacgctggatgcgcgccgcgagactctcgagacgctcctcccaatcgcgttcgctggcatccaggggcaggttggccagtaccgtatgcaggtcgtagccgtcttcggcgagctgctcctgcaaggctttgcgccgcaccaccagcccctgccactccaggcgctgctgctccagctggccacgcagcagttgcgattgctgctcggcctggccgcggcgcttctccacctcgcgcagttcgcgatcggcgtcttccagggccagccgcgcctgcttgagttcgtcctcgacggccatccgccgctccagcaactcctcgagcttcatgcgcagctcttccagcggtgccgccccctcctccagattgaggttgagctgttcgcaacgctcgttgaggcgcgccgactgctggtcgaggcgctccagggcctgctgggtggaattgtgctgcgccttcagcgagccgacccgcaccgccaactggtgcgcatggtccttgtgggtgcgggcatcctggcgaatccggtcgagccgttcgcgcagggcgtcacgctccgccagcagggtttcccggcgctcggtgtccagcgccatgctatccagcgcttcctgcagggtcaggcgcgcctcgctcagttgctcctgttccagcgcgcgctgctcggccagttccgccacttcttcgtcgagacggcggcgacgcagtaccagttgctcgaccttggcctgctgcgcggacaactgcgccttcagctcgccgtgccggcgcccctcctcctggacctggcgccgcacctgctcgcgcgcgccttccagctcgcgctgctcgtcgcgggccgcagccagacgctcctcgccttcggcgacacgggtttccagggcctcccgccgctcctgcaacgcctccagttcctgggcgcgggcgagcatgccgccctgggcctcgtcgctgcgccggacccgcaggaagtgccggccgacccagtagccatcgcgactgatcaggctctcgccgtcgtccagggcgccgcgctgggcgagcgcctgttccagggtctccaccggtttcacccgggccaaccagggactcaggtcggcgtcggcgcggaccttgtccagcagcgaaccggccgccgtcgcggctccgcgagcggggctgagcaggcgcagctcgcccttgccgaagccggccagggcgagcccgtcgaagccgtccagcaagaccgcctgcagatccgcgccgagcacggtctccaccgccagctcccaacccggctcgacacgcaagccttcggcgaggcgcggacgttgttccaggccctgctcgcgcaaccactccaaggcgccctgtccgggatcgagagcggcctgctgcagggcctccagcgaagcgatgcgcccgttcaggcgctgcaactcgccctgcgcctggtgctgttcggcggccagttgctgcaattcctggcgcaattgttcgagtcgctcggcttggccctgctcctgcaattgcagttcttccagggccagttcggcgatcgccacctgttcgttgagttcgaggatcgccgcgtcctcggggtcggccgccaactggccacgctcctcctgcaggcgccgctcgcgatcctgcaggcgctccaggctctgctccaggtgctggatgcgcgactgctgcacctcggcctggcggcggggttcggcgctctgctggttgaaggcatcccactgctgctgccaggcctgcatgccctgctcggcctgttccagggcgatgcccgcttcttccgcggcggccgcgctgagttcctgttccggtgcgagcatggccatttcctcggccagggtcgcgagcaaggtacggtcatgcccgaggtgcgattcggtttcctggcgggtccgttcggcttcgcgcaagtcgtcctgcaactggcgctggcgctgctggccatgctggatgctctgctcgacccgggcgatgtcgccgccgaccgaatagaagcgtgcctgcacctggttgaagcgttcggacaactcgtgatggccgtcgcgcagccgttcgatgccggcatcggcaccgcgctgctcggccaccagggcctcgaaggcgatctcctggtcgccgatgacccgctcgcgctgaccgacctgctcgttcaggtcgcgccagcgcacggcgcccagctgggctttgagctggcgctcctcggccttgtgctcctggtatttttccgccgactgggcctgccggtgcaggcgttccagttgccgccccagctcttcgcgcaggtcggtgaggcgtgccaggttttcctgggtccgacggatgcggctttcggtttcgcggcggcgctccttgtacttggaaatgcccgcggcttcctcgatgaagttgcgcaggtcttccggacgcgcctcgatcagcttggagatcatgccctgttcgatgatcgagtagctgcgcggccccaggccggtgccgaggaagatgtcggtgatgtcgcgccgccggcacttggtgccgttgaggaaataggtgttctgcccatcccgcgagacccgccggcgaatggatatctcggcgtactgggcgtattcgcccaccagggtggtctcggcgttgtcgaagatcagctcgatgctcgcctggctcaccggcttgcgggtattcgagccgttgaagatgacatcggtcatcgactcgccgcgcaggttcttcgccgagctttcgcccatcacccagcgcaccgcgtcgatgatgttcgacttgccgcagccgttcggccctaccactgccgccatgttgctggggaagttcaccgtggtcggatcgacgaaggacttgaaccccgccagcttgatgctcttcaggcgcatgcgtgcgctcccgccagggtcgccatcagcgttcggcgagcgcggccagcaccagctggcagttgtggcggccgtattccagcaggacctcgcggatcctcgcctcgtcacgggcgatcaccgcttgcaggagctgagcaaaactgccgaggaactggttcatttccgccttgcgccgttccagcgccaggtggtaggcgcgactcaccgccggcagcaggttttcgacggtctcctgcaggtagggattgttcgcgaaaggaaaggccgcgcgcatgatgtcgaagctggcctcgacgaagccgtcgatatcgctttgcgccaggttgttcagcaggcgctgctggatgaccaggaacggtgccagctcggcttcgctgcgccagcgccgggcgacgctttccgccagcaggatgtagagctgcacgatcagcgcgtagaggctttccacatgttgcggggacagttcggacacctgggcgccgcggcgcggcaggatgttcaccaggtggcggcgttcgagaatcagcagcgcctcgcggaccgagccgcgactgacgttgagggtctgggtgaccttctgctcctggatacgttcccgttccttgagttctccccggatgatgcgttccgcgaggtggtgggcgatctgctctgccaggctgtccggggccttgaacgtcatggtgatccttttatccaggggcgcgttttccgggggtatatggatgggaagtgtaacacagggcgttaccccgccggcttcccggcgaagcggcggacagaacgaaggttgggatggggcaggccggccaagggaggacaattgtcagacaatctaacaagataaatacgaggacttcccatgtttgcctcgctttcctctgcctggatgctgcgtctgaaaaagtacggctactggatctggctgatcgcggtgctcggcatcccgctcagctactggtggtcgctcggtagcgactaccccaacgcctggccctggctggtgatcagcgtggtgttcgggctgatcccgatcctcgatgccatcgtcggccgcgatccggccaaccccgaggaagccagcgaagtgccggagatggaagcacagggctactaccgcgtactgtccctggccaccgtcccgctgttgctgggcatgctcgtctggtccggctggatcctcgcccacgagacccgctgggactgggtcggccaactgggctggatcctgtcggtgggcaccgtgatgggcgccatcggcatcaccgtctcccacgaactgatccacaaggacccgcaactggaacagaacgccggcggcctgctgctggcagcggtgtgctatgccggcttcaaggtcgaacacgtgcgcggccaccatgtacacgtctcgaccccggaagatgcctcgtcctcgcgctacggccagagcctctactcgttcctcccgcacgcctacaagcacaacttcctcaacgcctggcgcctggaggccgagcgcctgaagcgcaagggcctgccggccctgcactggcgcaacgagctgatctggtggtacgccatcagcgccctcttcctgctcggcttcagcctggccttcggctggctgggagcgatcttcttcctcggccagtcggtgatggccttcaccctgctggagatcgtcaactacgtcgagcactacggcctgcatcggcggcgcctggacaacggccgctacgaacgcaccacgccggaacactcgtggaacagcaatttcctcctgaccaacctgttccttttccacctgcagcgccattccgaccaccatgcctacgccaagcgccgctaccaggtgctgcgccactacgacagcagcccgcaactgcccaacggctacgccgggatgatcgtcctcgccctgttcccgccgctctggcgcgcggtgatggacccgaaggtgcgcgcctactatgccggcgaggaataccagcttaccgacacccagcgcatctgagcgtcccgcccctgggaaacggcaccttcgggtgccgttttcgtttatgggcaaactgactgacctacaggtcaaaaaattatttgactcaaaagtcagttttttctagattcgcctccatagctcctaccgtggagccctgtgcggaaaccgccccactccggccggttctcctgcaaggcctagaattcaataacaagaacccgcctggaggcacgccttgatcaggttcctgctcaaccgggagatccgcgtcgaagaacgcctggaccccaacctcaccgtcctcgactacctgcgccggcacctcggcaagaccggcaccaaggaaggctgcgcctccggcgattgcggcgcctgcaccgtggtggtcggcgaactggtcaccggcgaggatggtgccgaacgcatccgctatcgcagcctgaactcctgcctgaccttcgtttccgcccttcacggcaagcaattgatcaccgtcgaggacctcaagcaccaggaccgcctgcacgacgtgcagcaggcgatggtcgactgccatggctcgcagtgcgggttctgcacgccgggtttcgtcatgtcgctgttcgccctgcagaagaacagcgccggcgccgatccggccaaggcccacgaggcgctcgccggcaacctctgccgctgcaccggctaccggccgatcctcgacgccgccgagcaggcctgctgccacaagcgcgcagaccagttcgacgcccgggaagccgccaccatcgagcaattgcgcgccatcgctccgcgcgaaaccgccgagctgaacagcggtgaccggcgctgcctgctgccgctcaccgtcgccgacctggccgacctctacggcgccaatccgcaggcacgcctgctggccggcggcaccgacctggcgctggaggtcacccagttccatcgcgaactgccggtgatgatctatgtcggccacatccgcgaaatgaaacgcatcgaagtgggcgccaactgcctggaaatcggcgccgccaccccgctgaccgactgctaccaggcgctggccgcggactacccggacttcggcgagttgctgcagcgtttcgcgtccctgcagatccgcaaccagggcactctcggcggcaatatcggcaacgcctcgccgatcggcgacgccccgccgctgctgatcgccctcggcgcgaagatcgtcctgcgccgcggcgaacggcgccgcgagctgccgctggaggagtacttcctcgactacaaggtcaccgcccgcgaagaaggcgagttcatcgagaagatcctggtcccgcgtgcccggcccagccaggcgttcaaggcctacaaggtctccaagcgcatcgacgacgatatttccgcggtctgcgccgccatcagcctcgacctggaagatggccggatcgcccgcgccagggtcgccttcggcggcatggcggcgattcccaagcgcgccgccgcctgcgaagcggcgctgcaaggcgcgcgcctggaagccgccagcttcgaacgcgccgcggccgccctggcgaacgacttcaccccgctcagcgacttccgcgcgagcaaggaatatcgcctgctgaccgcgcagaacctgctgcgcaaatgcttcctggagctgcacgctcccgccgtcgaaacccgggtgaccgcctatgtctaaccatcgcaagccgcacaagagccaggaagagctggccgacctgttccgcgccgagttgaccaccggagtcggccgcagcgtcaagcacgaaagcgcccccaagcacgtcagcggcgaggcgatctacatcgacgatcgcctggagtttcccaaccagttgcacgtctatgcgcgcctgagcgagcgcgcccacgcccgcatcacccgcctcgacgtgacgccctgctaccagttccccggcgtcgccatcgccctcaccgccgccgacgttcccggccagctcgacatcggcccggtggtggccggcgacccactgctggccgatggcaaggtggagtatgtcggacagatggtcctggcggtcgccgccgacagcctggaaaccgcgcgcaaggcggccatggcggcgatcgtcgagtacgaagacctggagccggtgctcgacgtggtcgaggccctgcgcaagcgccatttcgtcctcgacagccaccagcaccgcatcggcgattccgccgccgcgctggccggcgcgccgcatcgcctgcaaggcacgctgcacatcggcggccaggagcatttctacctggaaacgcagatttcctcggtaatgcccagcgaagacggcggcatgatcgtctattgctcgacgcagaaccccaccgaagtgcagaagctggtggccgaggtcctcggggtttccttcaaccgcatcgtcatcgacatgcgccgcatgggcggcggcttcggcggcaaggaaacccaggccgcggcgccggcctgcctgtgcgcggtggtcgcctaccacaccgggcgtccggcgaagatgcgcctgccgcgcatggaggacatgcagatcaccggcaagcgtcacccgttctacgtcgaatacgacgtcggcttcgacgacgatggccgcctgcacggcatccagatcgacctggccggcaactgcggctattcgccggacctctccggctcgatcgtcgaccgcgccatgttccactcggacaacgcctacttcctcggcaacgccaccatcaacggccatcgttgcaagaccaacaccgcctcgaacaccgcctaccgcggtttcggcgggccccagggaatggtcgccatcgaggagatcatggacgccgtggcccgcagcctgggcaaggacccgctggaggtgcgcaagctcaactactacggcaagaacgagcgcaacgtcacccattaccaccagaccgtcgagcacaacctgttggcggagatgaccgccgagctggaagcgagcagcgagtacgcccgccgccgcgaggaaatccgtgccttcaatgccgccagcccggtcctgaagaaaggcctggcgctgaccccggtgaagttcggcatttcgttcaccgcgaccttcctcaaccaggcaggtgcgctgatccacatctataccgacggcagcatccacctgaaccatggcggcaccgagatgggccagggcctcaataccaaggtcgcccaggtggtcgccgaggtcttccaggtcgacgtggagcgcatccagatcaccgccaccaataccgacaaggtgcccaatacctcgcccaccgccgcctcctcgggcaccgacctgaacggcaaggccgcgcagaatgccgccgaaaccatcaagcggcgcctggtggagttcgccgcgcggcactggaaggtcagcgaggaagacgtcgagttccgcaacaaccaggtgcgtatccgcgagctgatcctgccgttcgaggaactgatccagcaggcctacttcggccaggtctcgttgtccagcaccggcttctaccgcacgccgaagatcttctacgaccgcgagcaggcccgtggccggcccttctattatttcgcctacggcgccgcctgctcggaggtgatagtcgataccctcaccggcgaataccgcatgctgcgcaccgacatcctgcatgacgtcggcgactcgctgaacccggccatcgacatcggccaggtcgaaggcggcttcgtccagggcatgggctggctgaccatggaggaactggtctggaacgccaagggcaagctgatgaccagcggcccggccagctacaagattcccgccgtcgccgacatgccgctggacctgcgggtgaaactgctggagaaccgcaagaatccggagcagaccgtgttccattccaaggccgtgggcgagccgccgttcatgctcggcatctcggtctggtgcgcgatcaaggacgccgtggccagcctcgccgactaccgcgcgcaacccgccatcgacgcgccggcgacgcccgagcgggtgctctggggcgtggaacagatgcgccggctgaaggccgcccaggcgcaagcggcggacgccgcggtcgaaccggcctgaaccgccgcgatcgggaggatgacgagatgaactggatcagcgccctggccgagttgcagcgtagcggcgaaccttgcgtcctggtgaccatcatcgaggaacgcggctcgaccccgcgcaacgccggctcgaagatggtggtcagcgccgagcggctctacgacaccatcggcggcggccacctggaatacagggcccaggccattgcccgggaaatgctcgccgcgcggacccaggacacccgcctggagcgcttcagcctgggcgccagtctcggccagtgctgcggcggcgccacggtgctgctgttcgagccgatgggccagccgcaggcacacatcgccgtgttcggcgcgggccacgtcggtcgcgccctggtacccttgctcgccagcctgccctgccgggtgcgctggatcgattcgcgggaacacgaatttcccgcgctcctgcccgacggcgtggagaaagtggtgaacgacgaagtgctcgacgaggtcgagcggatgccgcccggcagccacttcatcgtcatgacccacaatcacccgctggacctggagcttaccgcggcgatcctggcgcgcaacgacttcgcctacttcggcctgatcggctcgaagaccaagcgcgtcaagttcgagcaccgcctgcgcgaacgtggcgtcgacgccgaacgcctgcaacggatgcgctgcccgatgggcctggagcaggtgaaaggcaagctgccggcggagatcgccatctccatcgccggcgaggtgatcgccacctacaacgccgccttcggcctggaacgcaagcaggggccgtcgagcgtcacccggctgaccccggagtcgcgccgcgcccacgaatcctgagcggccccccgctcccccgcgtccgccgccaggcggcggacctcccacgaaccttttttcgagactgccatgacccgcaacgccaaagcctaccgcgccgccatcctgcacagcatcgccgaccccgcggaggtcggcgtcgaacgctcctacgaatacttcgaggacggcctgttgctggtggaggacggcaaggtcgctcgcctcggtgacgccgaagccctgctcggcgagatcggcgacgtcgaggtcttcgagtaccgcgacgcgctgatcacccccggcttcatcgatacccacatccatttcccgcagaccgggatgatcgcctcctacggcgaacaactgctggactggctgaacacctataccttccccaccgagcgccaattcagtgaccaggcccatgccgaccaggtcgccgagatcttcctgcaggaactgctgcgcaacggcactaccaccgcgctggtcttcggcagcgtgcaccggcagtcggtggaatcgctgttcgaggccgcccggcgcctggacctgcgcctgatcgccggcaaggtgatgatggaccgcaacgcgccagactacctgaccgacaccgccgagagcagctaccgcgacagcaaggcgctgatcgagcgctggcacggccagggccgtctgctctacgcagtgaccccgcgcttcgccccgaccagcaccgcggaacagctggacatggcggcgcggctgctgcgcgagcatcccggcgtatacctgcacacccacctgtcggagaacctcaaggaaatcgagtgggtgaaggagctgttccccgagcgcagcggctacctggacgtctacgaccaccacggcctgctcgggccgcgctcggtgttcgcccatggcgtgcacctgtgcgacggcgaatgccagcgcctggcggagactggctcggcggtggcgttctgcccgacctccaacctgttcctcggcagcggtctgttcgacctgccgaagctggagcgctacaaggtcaaggtcggcctcggcaccgatgtcggcgccggcaccagcttctcccagctgcagtccctgaacgaggcgtacaaggtcatgcagttgcagggcgcccgcctcgatccgttcaagtcgctctacctcgccaccctcggcggcgcccgtgcgctggagctggacgaccggatcggcagcttcgccaccggcaacgaggcggacttcgtggtcctcgactaccacgccaccccgctgctctcctaccgcctgagccaggccggcagcctggccgaacggctgttcgcgctgaccatcctcggcgacgaccgcacggtgaaggaaaccttcgccgccggtcgctcggtgcatcgccgcgactgactcccggcggaaacgaaaaagccccgcatcgcggggctttttcatgcttcggatcaggccgccgagtcgctgtcggccttggcccggcgtggcttcttcttgccgccgaggaggtgcgagaacaccgcgtgcaagtcgccggaagcgttgtcgctctccaggttgagcttgctgtcgatgtgctccatgtggtgcatcatcagggtcaccgcgcgctccttgtcgcccttctcgatggcgtcgaggatctcgttgtgctcgtcgaacgagcagtgcgagcgaccgccgctttcgtactgggcgatgatcagcgaggtctgcgacaccaggctgcgctggaaactcaccagaggagcgttgcgcgccatctcggcaagcttcaggtggaactcgccggacaggcggatgccggcgccccggtcgccacgggcgaagctggattgttcctgcaccaccatctcgcgcaactcggccagacgctcggcggtggcgttgtcggtggccagttcggtgatggcgcgctcgactgtgcggcgggcgaaaaggatctgccgggcctcgtcgatgctcgggctggcgaccaccgcgccgcggttcggccgtaacagcaccacctgctcgtgggccaggcgcgagagggcgcggcgaatgatggtgcggctgacaccgaatatctcgccgagcgcctcctcgctcagcttggtgccgggggccaggcgttgttcgaggatggcgtcgaagatgtgggcgtagacgatctcgtcctgggtaccgctgcgggcagccttgccggtgcgcggcggcttcctgatgtgttgcaactgatcggtcatcggtctcgaaccttgtgcgtccggcttgtggcctgggctgatcctcgctcacgggcgtgggtgaggcacgccggcggctgatagcgaaatagtgtacacaagcagcggcatccgacgcaccacccctttccgcccctcgttccgagcgcgcggcaccgcccggaagggggcgtgacggaaagctgataaaaatgtggcgaaacaccctcaaacattctttgacctttttgtatacaaaggcataatcgctcgcacgagttcttgacccagaggtcagaaaatcgtgccctcacatcaccttcgagccgcgtcagggacctggtaaccaaccggcccgcaggacctaacaacaagagcgatgaggagtacctgctgtggaaagcaccaaacaagaagaacaagggatctacgctgcgacaccgcccgccaccggcctgctcgaacgcctgttcaagctccgccagcatggtacgacggtcaggaccgagctggcggccgggctgaccaccttcatcaccatggcctacatcatcttcgtcaatcccaacatcatggccgacgccggcatcgaccacggcgcggcgttcgtcgccacgtgcctggcggccgccctcggctgcttcctgatgggcctgtacgccaactggccggtgggcctggcgccgggaatgggactgaacgccttcttcacctacaccgtggtcggcaccatgggctacagctggcagatcgccctgggcgcggtgttcatctccggggtgatgttcatgctgctgaccttctcccgggtccgcgaatggctgctcaacagcatcccccgcagcctcaggttcgccatgggcgcgggagtcggcctgttcctcggcctgatcggcctgaagaccgccggcatcgtggtggccagcccggcgaccctgatcaagctcggccatctcacctcgcccggcccgctgctggcagcactgtgcttcctgatgatcgccgtgctcgagtaccgccgggtgttcggcggcatcctcatcagcatcctcagcgtcaccctggtcggctgggccctcggcctggtgcagtacggcggggtgttctcggcaccgccgagcctggcgccgaccttcctggcgatggacatcgccggcgcgttcaacgtcaccatgatcagcgtgatcctggccttcctcttcgtgcacatgttcgataccgccggcactctcatgggcgtcgcccagcgcgcgcacctggtgaaggaggacgggcgcatcgagaacctgtcgaaagcgatgaaggccgacagcgcctccagcgtgttcggcggcatgctcggtgtcccgccggtgaccagttacgtggagagcgccgcgggcgtggccgccggcggacgtaccgggctcaccgcggtggtggtcggcgtgctgttcgtcgccgcgatgttcttcgccccgctggccgggatgatccccgccttcgccaccgccggcgcgctgatctacgtggccatgctgatgatgggcggaatggcgcacatcgactgggacgagcacaccgagaccatcccggcgatcgtcacggtgatcatgatgccgctgaccttctcggtggccgacggtatcgccctgggcttcatcacctacgtcgcgatgaaggtcctcaccggcaagcaccgcgaagtctcggccagcctctatgccttgttcgtgatattcgtcgccaagttcatcttcctctgacccgcccggatggcggatggccgcacgcggctatccgcctcgaacctgtcgttgccccgcagggctcgcgacgcgcagcttcatcccccgcccattcgtaccctgcgccgcatttcccttcctgcccacgagtggcggataaccggcaaccctcggcgcactccccgcgaacgaaaaaaagcccgctcgatggcgggccagggaaaaggactcggagagtcagtgtttcgtggcacgcacctagctgccgcgataggtcgaatagctgtagggcgagatcagcagcggcacgtggtagtgatcgtcggcggaggcgatgccgaaacgcagcaccacctggtcgaggaaggccggctccggcaattgcacgccgcgggcgcgatagtagtcgccggcgttgaacaccagttgatagaccccgggacggaagtcctcgccttgcagcaccggctggtcgcagcggccgtcgtggttggtcagggtggtggcgatcagttccagttgctggccttctacccggtacagctcgatcttgatgccatggccggggcagccgtgtgcggaatccagtacatgcgtggtcaaacgtcccatgggttgcgggcgcccgctggcggacaccactcctcctcttgccttcgttcgatggggatcgctccgggacctgcccggcgccgctcgcttgcagcccgccagggagccgcttgcgaagcaatataagttatccttcgatgaattgtatacaaaaaacaccgccacaaccgaaaatgcggcagccgccccgaaatcgggcattccttccacaagccccaccccgcagggcctcattcttcgataactgaccagtcgggcaggttttttgctggatgaatggcagggatcggcaagcaggattgtatttacagaccgcaggcaaacttgtatacaataaatccatcacggcatccccggcccgtccggcccgccgccccatccacaataaggaacactgctgtgagcgctgactacccacgcgacctgatcggatacggcaacaaccctccccaccctcactggcccggcgatgcccgcatcgccctgtccttcgtgctcaattacgaagaaggtggcgagcgctgcgtcctgcatggcgacaaggagtccgaggcgttcctttccgagatggtggctgcccagcccttgcagggcgtgcgccacatgagcatggaatcgctctacgaatacggcagccgcgccggggtctggcgcctgctcaagctgttcaagcgacgcaacgtgccgctcaccgtgttcgccgtggccatggcggcgcagcgcaaccctgaggtgatcagggcgatggtcgccgacggccacgaaatctgcagccacggctaccgctggatcgactaccagtacatggacgaggcccaggagcgcgagcacatgctcgaagccatccgcatcctcaccgaactcaccggccagcgcccggtgggctggtacaccggacgcaccggcccgaacacccggcgcctggtgatggaggaaggcggcttcctctatgactccgacacctacgacgacgacctgccctactgggacccggccagcaccgcggagaaaccgcacctggtgattccctataccctggacaccaacgacatgcgcttcacccaggtgcagggcttcaacaatggcgagcagttcttccagtacctgaaggacgccttcgacgtgctctacgaagaaggcgcgacggcgccgaagatgctctccatcggcctgcattgccggttgatcggtcgcccggcgcggatggccgctttggagcgcttcatccagtacgcgcagagccacgacaaggtctggttcgcccgccgcgaagacatcgcccgccattggcaccgtgagcatcctttccaggagaccgaggcatgagccgtttccagaccctgacccccgcctcgctgtcccgcgaggccttcgtcgaagccttcgccgacatctacgaacactccccctgggtcgccgagaaggcctatgacctgggtatcgacgacagcctcaacgatatcgagggcctgcaccagcgcatggccgacattctcctgtcggcaagccgcgaggcccagctggcgctgatcaacgcccacccggacctcgccggcaaggcggcgatccgtggcgaactgaccgcctccagcacctccgagcaggccggcgccgggattcacgaatgcagcgccgaggagttcgcccgcttcaccgaactcaacgacgcctacaaggccaggttcggcttccccttcatcaaggcggtgaagggcagcaaccgccatcagatcctggcggccttcgaggaacgcatccagcactccgccgacgaggagttcgctaccgcgctggccgagatcaacaagatcgccctgttccgcctgcagcagctctgaggcctgcggatacgagcatgaacgccgaacactcgcccttccgccactacctcgacctcgccgacgcacgcctgggcagccaggtggtcgccgtcagcgacgaatggttcgccccggccagccgcatgctgcaggccggcgaaccggtgtggaaggaaggcgtattcgacgacagcggcaagtggatggacggctgggaaacccgccgcaagcgcttcgagggccatgaccaggcggtgatccgcctgggtgtgccgggcgtgctgaagggcgtcgacatcgacacccgcttcttcaccggcaaccatccgccggcggcttccctggatggctgcttctgcgccgaaggcgacccggacgacagcacgtcctggagcgaagtgctggcggcggtggggctgcagggcgatagccatcactaccacccgatagacgacgaacgtccctggacccacctgcgcctgaacatctacccggacggcggtatcgcccgcctgcgcctctatggcgtgccctaccgcgactggagcaaccagccgccgggaacggcgctcgacctggccgcagcggtcaacggcggccgggcgctggcctgctccgaccagcatttcggacgcatgggcaacctgctcaaccccggacgtgccatcaacatgggcgacggctgggaaaccggccgccgccgcacgccgggccacgactgggtgatcgtcgccctcggccatcccggcagcatcgaggcggcggtcgtcgataccttgcacttcaagggcaactatccggaaagctgcagcatccaggccgccttcgtggaaggcggaaacgaggcccggatcgaggcgcagagcctcttctggcgcgagctgctgccagcgcagaagctggaaatgcaccaggaacaccggttcgagcggcacctcaacgccctcggcccgatcacccatgtacgcctgaacatctttcccgacggcggcgtcagccgcctgcgcctgttcggcaggccacaattaccgtgagacccgggccccgcgtgcgtccggaatacaacaaacagaatcgacaggatcagtatgcgcactctcaagatcgagccgttgaccaaggaagccttcgccccgttcggtgacgtgatcgaaaccgccggcagcgactatttcatgatcaacaacggctccacccgccgttatcacaagctggccacggtcgagaccgcgcagccggaagataacgcgatcatcagcatcttcagcgccgagaagctggaaatgccgttgcgcatccgcatgctggaacgccatccgctgggcagccaggccttcatcccgctgctcggcaacccctttctggtcgtggtcgcgccacttggcgatgtacctgtaccgggcctcgtccgcgccttcctgaccaacggaaggcagggcgtcaattaccaccgcggcgtctggcaccatccggtgctgacgatcgaaaagcgggatgacttcctggtggtcgatcgcagcggttccgggaacaactgcgacgagcatttcttcaccgaggacgaacagctcctcctcgacccccaatcaaaccaataagagaggtcctgccgccggtccgccggccagggcaagaggtacaagactgtggaagcacatctcatcgaatggctgaacctgctggtgcgctggattcacatgatcgtcgggatcgcgtggatcggcgcttcgttctatttcgtctggctggagaacaacctcaaccgcagcaacccgcgtgaaggcctgtccggagacctctgggcaatccacggtggcggcatctaccacctggagaagtacaagctggctccgccgaaaatgccggagaacctgcactggttcaaatgggaggcctactccacctggatgtccggggtggtgttgctgaccatcgtgttctacctgaacccgaccctctacctgatcgcccccggcagcgacctggcgccggcagcggccatcgccatcggcatcggttcgctggtctgcggctggttcgtctacaccgtcctctgcgattcggcactgggcaagacccctgccctgctcggcctggtcctgttcgtcctgctggtcgccgccgcctacggcctgacccaggtgttcagcggccgcggcgcctacctgcacgtcggcgcgatcatcggcaccatcatggtcggcaacgtgttcagggtgatcatgccggcccagcgcgcgctggtgaaagccatcgaagaaaaccgcgagcccgatccggtgctgccagccaagggcctgctgcgctcccggcacaacaactacttcaccctgccggtgctgttcatcatgatcagcaaccacttcccgagcacctacggcagccagtacaactggctgatcctggccgccatcgcggtgctcgcggtactggtacgccactacttcaacacccgccacgaaagcaaccgcttcgcctgggcactgcccgccggcgcgctgggcatgatcgccctggccttcgtcaccacgccgaactaccagcaggcttccgcaccgctggccagcaccccggcggcggcaccggcacaaccggcgaccggcggcgacgcaccagccgcgcccgccgcgacccaggcctccaatgccggggccgcgagcggagccgacttcgacaaggtccatcacgtgatccaggagcgctgcaccgtctgccactcggcgaaaccgaccagccagctgttcagcaccgcgccaggcgggatcatgctcgacaccccgcagcagatccagcaactggcaccgaagatccaggcccaggccgtggcctcgcagatcatgccgctgggcaacatcacgcagatgacccaggaagaacgcaacctgatcggcagctggatcgccaagggcgcacagatcaactgagccttggccgaaaggcgaagaaccgcacctccggttccccgcagcagaacaaccctgctggccctacccccaaagccctctccatagagggcttttggccataactggccatatctttcagcccccaacctctccgataactcactttccttcaccccgggccgatggaacgaaaccgtgcggcgctccaccattgaaagcgaccaaccaaccatcgctatccgcaggtacgtgtcgtctcgtatttgcccagcaaacttcgctcgggtgatctgtgtggccgggggatctgtgctgcgtcgtgtgatagtgcgcgccccatcttcggctgccttgccaatgaagaactgtgcaactttttggttgataacgttgtggatagaacgctagggaacaaatacccaaagggctccgagagagtgcgcaactttttgcaagcggtgcgcaaaaagttgcgcaattttcagtgttcttcccatgagaatcgccagcgaatttttggcttcccccaataacgccttgatggaaaagagtttcaagaccagtggcacggttcttgtctagcaccgatgcccccggcatatcgcctgggcactttcaacgacaaggaacgtatccatggcaacccccgcctatatgtccatcaccggcaccaagcagggcctgatcaccgccggcgccttcaccgaggattcggtcggcaacacctaccaggaaggccacgaggaccaggtgatggtccagggcttcaaccacgaagtgatcatcccgcgcgacccgcagtccggccagccgaccggccagcgcgtgcacaagccggtggtcatcaccaaggtcttcgacaaggcctcgccgctgctgctggccgccctgacctccggcgagcgcctgaccaaggtcgagatccagtggtaccgcacctccgccgccggcacccaggagcactactacaccaccgtcctggaagacgcgatcatcgtcgacatcaaggactacatgcacaactgccaggacccgggcaacgcccacttcacccacctggaagacgtgcacttcacctaccgcaagatcacctggacccacgaagtctccggcacctccggctccgacgactggcgctcgccggtcgcagggtgagttgacaggcacaccggtcgtacacctgtacggccggttctccgtcgagccgaaaatgtccgctacttcgcgaaatagacaccgagccaagactttcggcagcggctgagcaagagtaacgtggcttgctcttccaatggattggaaaggaactgcccacccggaacagggaacgatccatgcgtcaaagagacctgaaattcaccttcgtcgttggcgaagggaaccttgcgttcgatgtcgtcgagttcgaactggaagaagcgctctgcgagcctttccgcctgagcctgaagctggccagcgacaagaacgccatcgatttcaggcaggtactcgaccagccgggcaccttcaccctctggcaggacggccgtccggcccgctatgtccatggcatcgtcagccacttcacccagggcagctcgggttttcgccggacccgctacgaactgctgctggaaccgcagttggcgcgcctggagctgtgctgcaactggcggatcttccaggagaagagtgttccggagattctccaggcgctgctcaaggagcaccgggtgctcgactacgaacagcgtatctaccacgagcacctgccgcgcgaatactgcgtgcaggccggcgacagcgatcactacctgcacgaccggctggccttcgaggaaggcctggtctactacttccgcttcgacgaacaccgccacaccctggtctgcagcgaccggctctacgtccaggagcgtatcgccggcggcccggtactgttcagcgcccagccggagggcgacaacccgcagccggtgcttcattctttccgctacagcgaaaatgttcgtacggctcgacagacccagcgggactacagcttcaagtgcccgacctacgaccaggagcatcatctcgctggcgaggcgctcgagcatcagggctcgtcctacgagcgctacgactaccccggtcgctacaagcggagcggcgccggccggcctttcaccgaaagccgcctcagaggacatcggcgcgatgcacgggtggcatcggtcagcggcgacgacccgcggctgatcccgggccacgcctttgccctggaaggtcatccgcgtgccgacttcaacgcctggtggcggccggtgcgggtggtccatcgcggcacccagtatgccggccaggaggaagagtccgccgacgcccctctgggggtgagctacgacctgcgcgccgaactggtacccgaggacgtcgaatggcgtcccgcaccgctgcctcggccgcgtatcgatggtccgcagatcgcgacggtagtcggcccggcaggggaagagatccattgcgacgagtggggacgggtgaaagtccagttcccctgggatcgcgagggacgtcacgatgagttcagtacctgctggatacgggtcgcgcagaactgggcgggtgccgactggggacacatggcgatcccgcggattggccaggaggtgatcgtcgattacctggacggcgactgcgaccagccgatcgtcaccgggcgtacctaccgggcgaccaaccggccgccctacgcgctgcccgaccacaagatcctcagcaccatcaagagcaaggagtacaagggcagccgggccaacgagctgcgcatcgacgacaccacggcgcagatcagtgcggcgctgatgagcgaccacggtgccagcgcgctgcacctgggctacctgacccatcctcggcccgaaggcggcaagccgcgcggcgagggcttcgaactgcgcaccgacgaacatggcgcggtgcgtgcggccaaggggctgctgctgagcaccgaggagcagctcagggccggcgccggccatctcgaccgaggcgtcgtggtgcaggtgctggaggcggcgctggagctggcccgcgagctgggtgactacgccggggagcaccagggcgtggggcacgacgcggcgccgcagcaaaccctccaggaagccgtgcgcgacctcggccacggcgccaacgacgagtccggcaagagcaacggaggcaagccggcgatcgccttgagcggtccggcagggatcgctgcggcgacgccggcgagcctgaccctggccgccggcgagcacgtcgacagcgtggcccggcagaaccagcaggtgaccgccgggcagaaggtggtgatcaacgccggcagcgacatcggcctgttcgcccagggcggcgagctgcgccagatcacccaccaggggccgatgctgctgcaggcgcagaagaacgacatccgcctggaagccgagcagagcgtggaggtcagcgccagccagcagcacgtgctggtcaccgcgaaggagcacatcaccctgatgtgcggcggcgcctacctgaccctcaagggcggcaacatcgagctgggcatgcccggcaacttcgtggtcaaggcggcgaagcatagtcatgtcggtcccgctcatgcatcgaccagcttcaacgcctgggattcgacaccgttcgatgaccggtatgtcctgcgcgacgaagccacgctggagccgttacccaatatcgccgttgaagtgatacgaggcgatggtggtgtggtgaaactgatgaccgacagccagggccgtttacccaagcaacaacacctggccatggacccggtgcagatacgcatcctgggcaagggcagtcacaacagcgacacggagtccaacacatgagcagcgaaccgctcgagccgaataatgatgtgatcatccctcgctctcgcgacaggctgggacggcctgtctacaaggcgcagttgacccgtaccgacaaccagagcgaaaaggtggcgctggttcggcagaccgctcccctgccggtgatcttcattccggggatcatgggaaccaacctgcgcaacaaggcagataaaagcgaggtctggaggccgccgaatggtctgtggcctctgggagacttcgctgcctcgtttggtgcgttgtggacttgggcctggaggggcccaaaggtccgtcaaaaacttctgagatccgagagagtggaagtcgatgaccaaggcacgatcgatgtcggccagtctggcctggatgaagaggctgcccgcctgcgcggctggggcaaggtcatgcgcagtgcgtacaaccccgtcatgggattaatggagaggcgactggataacatcgtcaaccgtagggaactccaggcatggtggaatgacgaagccctctcttctcctggagatcagggtgaggagcagggaaaggtggggccgatcgatgaagaggaattgctcaaggccagccgataccagttcgacgtctggtgcgccggttataactggctacagtccaaccggcagtcggcgctggatgtacgcgactacatcgagaacacggtgtggcccttctaccagaaggagtatggtctcgatcccgagcaaatgagtcgtatgaaagtcattctggtcacccactcgatgggagggctggtggcgcgtgccttgacgcagttgcacggctatgagcgcgtattgggggtggtgcatggcgtgcaacctgcgacgggttcctcgaccatctaccatcatatgcgttgtggctatgaaggtatcgcacaggtcgtgctgggacgaaatgccggtgaagtgacagccgttgtcgccaactcggccggcgcgctggagttggcccctagcgccgaataccgggaaggacgtccctggctgtttctgtgcgacgcgcaaggccaggtactcaaggatattgatggaaagcctcgggcttatccgcagaaccaggatccttatgaagagatatacaagagctctacgtggtatggattggtgcctgaacaaaatgcacaatatctagacttatcaaacactgaaaataaaaagaaaaatcccagggtaatttttgagaagaaaattgatgctattgctgactttcataatgaattggctacggcgggctaccacgtcgaaacctatgttcattacggtgctgacgatagccgccatagttggcgtgatttgatctggaaaggtgacccgacccctctggaaacccctggcgccacactcaacgacgatgagaacggcacttacaacagttggttccgccggggcttgcccaccatagtgcagggtccgctggaggcgggaaatccactggacgcttccggcagcggaggtgacgaaacggtaccgaccgactccggccaggcgcctgccctggcaggtgtcaaggccagctttcggcatggcagcaagggcaagggacaggccaataccaaacggggctatgagcaccaggagagttacaacgatgctcgtgcccaatgggcagcgctatatggtgtgatcaaaatcacccagttggcggattggcatcctaatgacaaaggagggacatgatgcatccccgtcggttgtttgctgtacttgggttggtggtcttgaccagcatgaccagttgtacttcgttttcttcttctcggagcccttccatggacaagaccggatggatcactcattgctttggtcgctttctgattgatctgccgcctgacgcggtaattaacgccggatactatctatggggcgacaacatccaacggctagatggcacacctgctgagctagcagccaggattgcccatcgcgagcaagagttacggaatggcattcataaaaaaacaaaggagagcatgtttgttcggagggtggaagacaaggctggagccattagcctgtggtcttgggattcgaatgctagtttgctttcttatagggttgactcatattttgtggctcatcccaagggagaggtttttctatactcaggagaagttactcacgataaagagaaggaaggggaggaagctatcaatgatatatcccgaagccttcgctctcgcgagcccaaagaagctccaactgagccgggcttttgcattgatcatgcctatattgcaggggagagttttcaagatgaagagtttggcgtaggtgttacctttcccaatcaccctggtgcgcgctttgaattccgctcctccacgggatctgagctaaacagccttcttgagcgagtcgacggcttcgtgcagaacatgctcgctacggttgctggagtcgagagattgagaaaggggaagcaccctgtggggagccttccgggagaggagtacttggttgcgggaagcaacaagggacagcgcgcctacacattcatgtgggaggttcaaggcaaggaggaatcgctaaccgagcccaatcttactgcgggactggcggtactggaacgcagcaatgaaaacggtaaaccaccgccccctgccttcaaatcggacaaagaggctttggaactgtgggacgccattgtcgattcgatccgcgtgcgcccgacgtcttcatcgccgcgtggcggaaatgccggtccttcccctgctccgaaacccgctacgcctggcggccaaacgctgggtgatcactatgtctacgaggaattcctctccagcctgaagccaaaagacagctggctggacgacctataggagcaacccgcgatggacatcattcgccttggcgacaccaccagccatggaggcacggtgattgaggcgttcggccagaccgacctcaacggcaagccgatggccggtgtaggccaccaagtggtttgccccttgtgcaagggaaccttccccattaccgaaggtagcgccctgctggatgtgaatggggtcccggtcgcgctacatgggatgaaaacagcttgtggtgccagcctgattgccagtggcccgttgggcgctgccgaaaactgaaaaagggggacgttcgatatgccgaaagacttcggcgacctccttcgtgcctctcctgtagaacgctcaggaaaactccgccggcttcctgcccagcctgacctgccccgagccttggcaccttggccagtctgccgttgtgcactccagcaagcgctggcggcattctctttgctcgttgagcgtctccattgccgccaggatctactggcgctcagatagccggttgctctcgcgcacgtcgctacttgtagtcgccaatgcaagcaggcgttccgcaaagacccatggctgatcccgggcgacagggttcaaggccttgctgcaccaggcttgcgctcactgaggtagtggtcgctgaaaactcccagcggctagagcacgtcggctatccgaccaatgtcgtacaccgccgggcgtcccgggggtagccggcgccagttctatggatacagtggaagcagctctggaaagcctgtagtagaccgattggtcaactacaaaaaattactttgtatacaaaaaatcgattgaatcgagcacacaacggggatataaaacaccccaccgcatcgccctgaagcctggggtggatgttcggccagaaatacccggccgccggaacctgccttttccggtgtccgcctgcgactgacaacaataaaaacgcctgaggtgttgcatgtccgtggtaactgatcgccgcatccccgactcgcccgtagaccagcgcctgccgctgacgcagctgctgctggtgggcttccagcatgtgctgctgatgtacggtggcgccgtcgccgtgcccctgatcgtcggccaggcggccggcctctcgcgcgaggaaatcgccttcctgatcaacgccgacctgctggtcgccggcatcgccaccctggtccagtcgctgggcatcggcccgatgggcatccgcatgccggtgatgatgggcgccagcttcgccgccgtcggcagcatggtggcgatggccgggatgcccggcgtgggcatcaccgggatcttcggcgcgaccatcgccgccggtttcttcggcatgctcatcgcccccttcatgtcgcgcatcgtgcgtttcttcccaccgctggtgaccggcacggtgatcacctcgatcggcatgtgcctgttcccggtggcgatcaactgggccggcggcggcaagggcgcggaagacttcggctccctgcacttcctgttcctctccagcctggtgctctgcaccatcctcctgatcaaccgcttcatgcgcggtttctgggtcaacatctcggtgctgatgggcatgggcctgggctacgcgatcgccggcggcatgggcatggtcgacctcggcggtctggccgagcgcccctggttcgacatcgtcaccccgctgcacttcggcgcgccaaccttcgacctggcgccgatcctgtcgatgtgcctggtggtagtgatcatcttcgtcgagtccaccggcatgttcctcgccctgggcaagatcaccggccgcgagatcaccccgaccgaactgcgccgcggcctgctctgcgacgccggcgcctcgttcttcgccggtttcctgaacaccttcacccattcctcgttcgcccagaacatcggcctggtgcagatgaccggggtgcgcagccgctacgtcacggtggccgccgccggtttcctgatcctcctcagcatgctgcccaaggccgccttcctggtcgcctcgatcccgccggcggtactcggcggcgccggcatcgccatgttcggcatggtcgccgccagcggcatccagatcctccacgaggccaacatcaccgaccgccgcaaccagttgctggtggcggtaagcatcggcatgggcatggtgccggtggtgcgcccggacttcttcgcccgcctgccggtctggatggagccgatcacccatagcggcatcgccatgaccgcgatctgggcggtggtgctgaacctgctgttcaacatcctcagccgcaacgaccgcagccacttgtgcggcagccacgcgccggcgcccaagcactcctgactccctggcggaccggcgacactcccggtccgcccttccctcgggccggacttcgtccggcttctttttttccgctcgcggtccgcaccactcagtcccgccgaaggaaaggccccgccttgcgctccagcagatgcagcaattccgcctgcatgtaggcgtagtcgtccgggatatccaggcagaccaggcgcttgcctttcatcgccgcggcgtgccggcgcagcagcgcctgccggtggcggcgctccatgacgacgaccagcgtcgcccattccagttgctcgcgctccaggggcgtctcggcgtccgccgccagcccggcggaatcggtctcgacgcccggccagtcggcgaacagccgttcggcgctgggactacgcaggcggttgcggctgcagatgaacaggacccggtgcatgggaggctttcctttgctggcgcggcaggcagcatgacgtcttcgccgcgtttcggcgttgcgccgcgtcgcttttcccgggacggggcagcgagcggtgcgtgccggaacacggtcacccgggtggcatgggggaggaagcggcggatggcgccgttggtgccatcgtcccaggaggataccgtcagccgccggtcatgctcatgaaacgcagcacctggacctgctcctgggcgtcgaagtgatgccgctccggcttcaggttcagcgccgccaccagtgccgcgctcaggcgctcgcggtcgccgggatggctgcgcagcagttcgcgcaggtcgagcgccccctcgtggccgaggcagagcaccagcttgccctcggcggtgacgcgcacgcggttgcagtcgccgcagaaattattgctgtgaggtgagatgaagccgatccggctgggctcgtcgccgatctggtaataccgcgacggcccgccgctgcgcgccaggctcggggtcagcggccagcggcgctcgatgatcgcgcggacttcgtcgctggtgcagagggtcagttcgcgacggtggctggtgatgctgcccagcggcatttcctcgatgaaactgatgtccaactggttggccagggcgtactcgaccaggttgaggatctcgtcgtcgttgcggcccttctgtaccacgcagttcagcttgatccgctcgaaaccggcttcgcgcgccgcctggatgccgtccagcacctgctccaggcgatcgctacgggtgaaggcggcgaagcgttcgcgctgcagcgagtcgaggctgacgttgaggcggcggacgccggcggccttcagctcggcggcgcgctcgcggagttgcgaaccgttggtggtgatcgccaggtcttccagttccgcacgctgccccaggcgtgccagcaggccggtgatgcccttgcgcaccagcggctcgccgccggtgatacgaatgcgccgcacgccgaggccgatgaaggcgtcggccaccgcgtacagttcttccaggctgaggacctggtcgcggggaaggaactgcatgtcttcgctcatgcagtaggtgcagcggaagtcgcagcgatccgtcaccgacaggcgcaggtaggtgatgcgacggccgaagggatcgaccaggcgggaatcggacatagtgactcgttctgttccggggggctcgcccggcgctcggtgggtgagtgcgagcgggcgactcgatacccctaacgaatactccaaataccggaaaatgtatagggcaaatgaaccggcgggtcaggatttcccgggcctccgcctcgctcgcaccttgcttgaggggcgctccgggcgggtgctaccatcctcggcttcctgccgccgttgcagcaatgaagaacaaggactgatgaccagcatccgcgagcgcaacaagcgcctgatcctccgcgccgccagcgaggaattcgccgacaagggcttcgcggcgaccaagaccagcgacatcgccgcccgcgccggcctgcccaagcccaacgtctactactacttccagtccaaggaaaacctctatcgctgcgtgctggaaagcatcgtcgagccgctgctgcaagcgtcggcgccgttccgcgtggaagacgacccgctgctcgccctgcccgcctacatccgctcgaagatccgcatctcccgcgagctgccgcatgcctccaaggtcttcgccagcgagatcatgcacggcgcgccgcacctgccgaaggaatacctcgacgaactgaacgcccaggcccagcgcaacgtcacctgcctgcagacctggatcgaccgtggccagctcgccccggtggacccgcatcacctgctcttcgccatctgggcggcgacccagacctatgccgacttcgattggcagatttccatcgtcaccggcaaggaacagctcagcgacgccgactacgacgctgcggtggaaaccatcacccgcctggtcctgaaaggctgcgcgcccgacgggcaatccggcaagagcgccggccggcttcggccgctgccgctctgacccgccgcggcacgctcaatcgcgtgccgcccccgccccagcgccggcttcgcaccgagcggcgtgacgcggtattcgacccgcggcggcagctccgcatacacctcgcctggacgctatcggcggagttgctcgagcacggtatccgggtcaacgccctgagcccggggccgacccggacgccagcgctggacaaggccgctaccgatgtcgaggccacccaggcgctgagggagaagattggccgggacgcctgggggagccgctggagatcgccagtgccgcgctattcctggcctcgaacgagccccgctgcaggtatggcacggagagcctggtggatggcagcgtacgccacctgaagaagggagcgaaggcccggtcctggtgagcgggccgcaagctcaaccggcgtcgggcaccagcccgaccgccagcacgccctggatcgcgcattgctcgtcgatatccgaggtatcgccgctgataccgaccgcgccgaccacctctgccttgtcgttgcgaatcaacaccccgcccggcgccggaaccagattgccatgggccagggtgttcaccgcggaaatgaacgaaggccgctgctgcgcatccgccgccagcagacgcgacgacttgcccagggccacggcgccccaggccttgccgatggcgatctgcggtcgcagcatgctggcgccgtcctcgcgctgcagcgccaccaggtggccgccagcatcgagcaccgcgatggtcaggggcgcggtggacagctcgcgccccaccgccagcgcctggcgggtaatgcccagcgcggtttccagactgatggtggtcatggtcgttcctctcgagttgttaaggctagaaatcgggaaaccacccgctatgcgggcgcgttcgaaaatttgtacccaatctagtagccgaccggccctacgaaagcaacattccagaacaatatgaacataattttgtatacattttttcaaacgctggttttataagcctgctaacaagcattacaactaattgtttttattatgaaaaaatggatttcagcggctttttcaagcgtatacaacccatcttgaccttgcgctccccctctgcctagaatcgttccaacttttgtacacaattagtataagaacgaggaacaaaacgatggccagaatgagagcaatcgaagccgccgtactggtgatgcgccgcgaaggcgtggataccgcgttcggcgtccccggtgccgcgatcaaccccatgtacgccgcgctgaagaagatcggcggcatcgaccatgtactggcccgtcacgtcgaaggcgcctcgcacatggccgagggctacacccgtaccaaggccggcaacatcggcgtctgcatcggcacctccggccctgccggcaccgacatgatcaccggcctctactccgcctccgccgactccatcccgattctctgcattaccggccaggcaccgcgcgcccgcctgcacaaggaagacttccaggcggtcgacatctccagcatcgccgcgccggtggccaagtgggcgaccaccgtgctggaaccggcccaggtcccctatgtattccagaaggccttccagctgatgcgcagcgaccggcccggcccggtactgatcgacctgccgttcgacgtacagatggccgagatcgagttcgacatcgacgcctacgagcccctcccggtgagcaagccgaaggccacccgggtccaggccgagaaggtcctggccatgctcgacgaagccgagcgcccgctgctggtggccggcggcggcatcttcaacgccgacgccgccgagcgcttccgcgaattcgccgagctgaccggcatcccggtgatcccgaccctgatgggctggggcgtaatccccgacgaccacccgcagatggccggcatggtcggcctgcagacctcgcaccgctacggcaacgccaccctgctggaatccgacctggtgctcggcatcggcaaccgctgggccaaccgccacaccggcagcgtcgaggtctataccgaaggtcgccgcttcatccatgtcgacatcgaaccgacccagatcggccgggtgttcatgcccgacctgggcatcgtctccgacgccggcgccgccctcgacgcattcctcgaagtggcccgcgagtggaaggccgccggcaagctgaagtcgcgcgccgcctggctggaaagctgccagcagcgcaaacgcacgctgcagcgcaagacccacttcgacaacgtgccggtgaaaccgcagcgcgtctacgaagagatgaacgagttcttcggcaaggatgcctgctacgtcagcaccatcggcctgtcgcagatcgccggcgcacagttcctccacgtctaccaaccgcgccactggatcaactgcggccaggccggcccgctgggctggaccattcccgccgcgctgggggtggtcaaggccgacccgagccgccaggtggtggcgctctccggcgactacgacttccagttcatgatcgaggaactggcggtcggcgcgcagttcaagctgccctatatccacgtactggtgaacaactcctacctgggcctgatccgccaggcgcagcgcggcttcgacatggactattgcgtgcagctggccttcgacaacatcaacgcccccgagctggaaggctacggcgtcgaccacgtcgcggtggtcgagggcctgggctgcaaggcgatccgggtgttcgacccgaacgagatcggcgccgccctggccaaggcccgcgaactgatgcagcagcaccaggtgccggtggtggtcgaggtgatcctggagcgcgtcaccaacatctccatgggtaccgagatcaacgccatcaacgagttcgaggaactggccgagaaaggcgccgacgcgccgaccgccatctcgctgctcgactgatcgccggcctttcccggaggcgcggacggtgcgtgcgacaccccgcccccggcgaaaggcctcccgaacgtttgaccgaacgataggagcaagacatgccccgtttctgtgccaacctgtccatgctgttcaccgaggtggatttcctcgaacgcttcgacgccgccgccaaggccggcttcgccggcgtcgagtacctcttcccctatgacgtcgaggccgaggcgatcaaggcccgcctggaagccaacggcctggagcaggtgctgttcaacctgccggccggcgactgggccaagggcgagcgcggcatcgcctgccacccggatcgggtccaggagttccgcgagggggtcgacaaggccatcgcctacgccagggtgctgggcaaccgccaggtgaactgcctcgccgggatccggccgcaggggcacgactgcgccagcgtcgagaagaccttcgtcgacaacctgcgctacgccgccgacaagctggaagccgcaggcatccgcctggtcatggagatgatcaacaccctcgacatccccggcttctacctgcagaacacccgccaggccctggagatccgcgacaaggtcggcagcgccaacctgttcctgcaatacgacatctatcacatgcagatcatggaaggcgacctggcccgcaccctggaaaaccagttggcggcgatcaaccacgtgcaactcgccgacaaccccggccgccacgaaccgggcaccggcgagatcaactaccgcttcctcttcgagcacctggaccgcatcggctaccagggctggatcggctgcgagtacaagccggccaccaccaccgaagccggcctcggctggatgaagacgcacaacgtcgtctgatccgcacccacgaacaagacgctcccgcctccctgcgcggagccactcgacagacagaaccaggagacactctcatggccaagatcggattcatcggcaccggaatcatgggcaagcccatggcgcagaacctgcagaaggccggccacagcctgttcctttccacccaccacgacgccgctccggccgacctgctggaggccggcgccattgccctggccaacccgaaggaagtggcccaggaagccgagttcatcatcgtcatggtgccggacaccccgcaggtcgaggatgtgctgttccgcaaggacggtatcgccgagggcgtcggcccgaacaaggtggtgatcgacatgagttcgatctcccccaccgccaccaagggcttcgccgagaagatcaaggctaccggcgcgcagtacctggacgccccggtctccggcggcgaggtcggcgccaaggcggcgaccctgagcatcatggtcggcggctgcccgaacaccttcgaacgcgccttgccgctgttccaggcgatgggcaagaacatcacccgcgtcggcggcaacggcgacggccagaccgccaaggtggccaaccagatcatcgtcgcgctgaacatccaggcggtcgccgaggccctgctgttcgccgcccgcaacggcgccgatccggccaaggtgcgcgaggcgctgatgggtggcttcgcctcctcgcggatcctcgaggtgcacggcgaacgcatggtcaagggcaccttcgacccgggcttccgcatcagcctgcaccagaaggacctcaacctggccctggccggcgcccgcgagctgaacctgaacctgcccaacaccgccaacgcccagcaggtgttcagcacctgcgcggccatcggcggcagtaactgggaccactcggcgctgatcaagggcctggagcacatggccaacttctcgatccgcgacgagtgatccgcagtccgcgcgggccgtcaccccgcgcggagcgacgaaccccttttcgaagggctcggggagaggaacggtcggcgaactccggtgttcgccgccgccctcttccttccccgcccacaaggcggggtaaaggaagcgaacgcccggccgggagattcacggcctctgcgtccgggcgcctcgcttccattccccagttcccgccggcgcgggtactgcggaatggaagcgtcgacgacgctgcgaccgccggtccgaccggcggcacgacaacaagaaattcggagcctgtcatgagtaccgatccacgcgcctttctcaccgagctgttcaataccgcggtggcagccggccatccctaccaggtgctggccgaccacctgccggaagatcgcagcgggcgcgccatcgtcatcggtgccggcaaggccgccggagccatggccgaagtggtggagaagcactggcagggcgagatccagggcctggtagtggcgccttaccgctacggcgcgcaatgcagtcgcatcgaggtggtggaagcctcccatccggtgcccgacgacgccggcgagcgcgtcgcccgtcgcgtgctggaactgatcagcggcctgaacgagagcgaccgggtgatcttccttctctcaggcggcggctccgcactgctttcgctgcctgccgaaggcatcggcctggcggacaagcaggcggtgaacaaggcgctgctcaagtccggcgccgccatcggcgagatgaactgcgtgcgcaagcacctctcggcgatcaagggcggtcgcctggccaaggcctgctggccggccagcgtctatacctacgcgatttccgacgttcccggcgacgaggccacggtgatcgcctccggccccagcgtcggcgacccgaccacctccgccgacgccctggcgatcctcaagcgctacgccatcgacgtgccgcagaacgtcctcgactggctcgccgacccgcgctcggaaaccgtcaagcccgacgacccgtgcctggcgcgcagccacttccagttgatcgccacgccacagaacgccctcgacgcagcagcggtgaagtgccgcgcggccggcttctcgacgctgatcctcggcgacctggagggcgaggcgcgggaagtcgccaaggtccacgccggcatcgcccggcagatccgcaagcacggccagccgctggcggcgccctgcgtgatcctctccggcggcgagaccaccgtcaccgtgcgcggcaacggtcgcggcggacgcaacgccgagttcctcctcagcctcaccgccgagctcaagggcgaaccgaacatctgggccctggccggcgacaccgacggcatcgacggctcggaagacaacgccggcgcgctgatgacgccctgctcccatgcgcgcggcgaaaaggccgggctgaagatccgcgacgagctcgacgacaacaacggctacggctatttccaggccctcggcgacctgctggtgaccggaccgacccgcaccaacgtgaacgacttccgcgccattctcatcctcgagtcctgacatgacagccgacaagaaagccaagatccttgccaccctcggcccggccacccgcagccgcgacgatatccgtgccctggtggaggccggcgccaacctgttccgcctgaacttcagccacggcgactacgccgatcacgcgcagcgcttcgcctgggtgcgcgaggtggaagcggagctgaactacccgatcggcgtgctcatggacctgcagggtccgaagctgcgggtcggccgcttcgccgccggtgccgtgcaattgcagcgtgggcagaccttcaccctcgacctcagcgacgcccccggcgacgagcggcgggtcaacctgccgcatccggagatcatccatgccctggaaccgggcatgagcctgctgctggacgacggcaagatccgcctggaagtggtcaactgccacagcgacgccatcgagacccgcgtggcggtgggtggcgagctgtccgatcgcaagggtgtcaacgtgccggaagcggtgctgcaactcagcccgctgaccgacaaggaccgccgcgacctggccttcggcctggaactgggggtcgactgggtggcgctgtccttcgtgcaacgcccggaggacatcgacgaggcccgtgggctgatcggcgacaaggccttcctcatggccaagatcgagaagcccagcgcggtgagcgccatcgaggcgatcgccgagcgcgccgacgcgatcatggtggcgcgcggcgacctcggcgtagaggtgccggcggagagcgtgccaggcatccagaaacgcatcgtccaggtctgccgccagctcggcaagccggtggtggtggccacccagatgctcgagtcgatgcgcttctcccccgccccgacccgcgccgaggtgaccgacgtagccaccgcggtgggcgccggcgccgacgcggtgatgctttcggcggaaaccgcttccggacaataccctcgcgaggcggtagagatgatggcgaagatcgtccgccaggtggaggccgagccggactaccacgtccagctcgaggtcaaccgtccgcagcccgacgctaccgtctccgatgcgatcagctgcgcgatccgccgggtcagccggatcctcccggtggcggtgctggtgaactacaccgagtcgggcaactcgaccctgcgcgccgcccgcgagcggcccaaggcgccgatcctcagcctgaccccgaacctgcgtaccgcgcggcgactgaccgtggcctggggcgtgtattcggtggtcaacgagcaactggcgcacgtcgacgagatctgctcgaccgccctcgacatcgccctggcccagcgcatggcgcgccgcggcgacaccgtggtggtcaccgccggcgtgccgttcggtcgccccggctcgaccaacatgctgcgcatcgagaccgtggcgccgccgctgggagatctctgaagcaacgagttcggtccggctcgcgccgtccccccgggcatgcgggtcgggccacccttgtctctctcggatggatggggccggaaatacggggccgcgtctccatccatccgggaaagaccttcttgtcggaccatggcctccctcgcgcactcccatgcaggccatggacattcaaggcctccggttcaactcctgccggaggtctttttttcttcttggaacgccctgcatgcatgaccctcgcctggccttctcgtccggggtgcgtcgcctccgcgccagaccctacaatgaccgcccccgcccctcgcgcaggcctggcatctccgtgcctgccgagcggcccttgccgcactgaccgccatgcccctgcaatctctcctcaatgcatcccgaatcctcctgcgcggcatcagccaggtgttcctcctgggcgacccacgcctgggcctggcctgtctgctggcgatcgccgtcggcgcgccgccgctgctcgccggcgccctccttggcggcgccctcggcccgttgctggcgcgcctgttgcactgcgccgacagcgacatcgaggccgggctgtacggctacaacgccgtgctgatcggcatgctgctggcattccgcttcgcctggtcgccggggctggtgtcgctggtagcgctcggctgcctggccagcgtggcgttgcagcgcctgttcctgcatgggctgcgccgacgccgctggcttccgccctataccctgggcttcgtcctcaacggctggtggctggtgcccctcggcgcctggctaggcctggccccggcgacccatggcggctgcttcagctgcgcctggagcggcacggcggagctggcggcgctagcgcaggggatcggcgagatcatcttcctcggtgaaccgctggcagggctgctggtctggctcggcctgctgctggtctcgcgtccctcggccgcctgggccctcgccggcgccgcggccagcctgccgctggcctggctgctgggctacgactgggcgagcgcgctcgccgggctctacggcctgaacgccgcccttgccgggctggccctggccttgcgctaccgcagcgcctggccgccactgctcggcatgggcctggcggtgacactgcaaccgctgttcggcctgctcggcctgccggcgctgaccgcaccgttcatcctcgcctgcctgctttgcatcggcggcgagcgcctgtacctgcgcctggccggcagcctcggtccgcgcctcggccggcgacgctcctgagcgggggaacgctggcgccggcgggctagtctggtaaggtgccgcatccatcatcaggagccacgatgagcgcacccgacagctggcgcgaacgcctctacatcgtcatcttccagaccgacacccgcgacggccggcgcttcgacagcgcgctgctgctggtgatcctggccagcctgctggtagtgatgatcgacagcatcgacgaaatccaccaggactacggcgacctgctggcctacatcgaatggggcttcaccggcatcttcctggtggaatacctgctgcgcctgtactgctcgcccaagccgctgcgctatgccttcagcttctacggcctggtcgacctgctggcgatcctccccggcttcctcgccctgctctaccccgacgcccagtacctgctgatcgtccgggtgatacgcatgctgcggatcttccgcgtgctcaagctgcgccagtacctgagccaggccaatttcctgctcaccgccctgcgcggcagcaagcagaagatcatcgtgttcttcctcaccgtgatgaccctggtcaccgtgttcggcgcgctgatgtacgtggtcgaaggcccggagcacggtttcaccagcatcccccgcggcatctactgggcgatcgtcaccctgaccacggtcggcttcggcgacatcaccccgaagaccccgctcggccaggccatcgccagcctggtgatgctcaccggctactcgatcatcgcggtgcccaccgggatcttcaccgccgaactcgccaccgcgatgcgccaggacccggccaacctgttgcagcgggattgcccggtgtgccgcaaggcgacccacgaagtgcaggcggcattctgctgccgctgcggcaacccgttgttccctcgcgaggaaggcagccatgggaagtcttgaccggcagcgctgggacgccctctggcagcgactcggcggcaacccgccggcggatgccttcgacgcgctgctggcggcctatggcggggccgaccggcactaccacagcgatcgccacatcctcgcctgcctggagcacttcgaccgctggcgccaactggcgctgcggccggacctggtggagctggcgttgtggacccacgacctggtctacgacacccagcgccaggacaacgaggccgccagcgccgccagcaccgagcactggctcgaccaggccgggctggcggcgctgcggccggccctgcgcgaactgatcatggccacctgtcaccaggcgccgccgggagacgccgacgcagccctggtggtggatctcgacctcgccatcctcgccgcgccggcgccggtctacgcacgctacgaggcggacgtccgcgccgaatacgcctgggtgccggaaccgctgttccgcgccgggcgcggcaagttgctgcgccagttgctggagcaaccggcgctgtaccactgcgaaccgctgcggcagcgctgggaggccgccgcccgcgccaacctgcgcggtgccctggagcgcctggaacagccggcctgagccgcacgggaaaatttcttcgcaccgcttaacccgtctttcgccgtgcttgcgtctcaggcagcaggaaggaaccgcacgcacgggttcctcgcccctccatccgcccaaggaagagatatcgtgaatcgactcgccgcctctccgctcctgttcgccggcctgttcgccagcgctccgttgctggccgcgccacaagcggtcgacagccgcatcagcgcggtcaccgtctatgccgaccgtgccgtggtcacccgcaccgcccgcctgcaattgcccaagggccagcatgagatcgccctggagcaactgcccttccagctcgacgacgccagcctgcgcgcgtccctcggcgccagcgccgccgccaccctgctcgacgtcagcagcgccgcgcaacgggtcgagcgcccggacgacaaccgtgtgcagcaactcgaccagcaactgcgcgagatagaccggcaactgcgggaaatccatgaccgcggcagcgtgctcgaagcgcagaagaagttcctcgccgacatccagagcggcagcacccagcccggcaaggatcgccccatgcccggcatcgacgagctgaagagcctgctgcaactgaccgaaggcaacctcgaacgcctgctcgccgagcagcgccagctggacgaccgcgccgccgaactggaacagcgcaagcagcagttgcaggagcagcgcggcaccctcaacggcgacggcaagcgcttcaagcgcgcggtcctgcgggtcgccctggagcaaccggcacaggtcgaggtgaagctcgactacaccctgcgcgacgcctcctggcagccgacctacgacgcgcgcctgcgcgacggcgcgaagaccatcgaactgacctaccagggcctggtccggcagagcagcggcgaagactggaccgacgtcgacctgaccctctccaccgcccgtccggccctgggcggcaacgtaccgcggctgaatccctggatcgtcgacatcgacgcgcccaacgcctactacggtgccgagatggccatgcaggacgctccggcgcccatgccgcaagccgcgcccatcgccaggacctcggcgaagatggccatgccggcctcggcgccgaagctggccgaggcgcggctcgccaccgcggaggtcagcagcggcgccgccagcgcctctttccacatccccgtgccggcgaccctgaacagcgacggcagcgcgcagaaggtcaccatcgcccgcctggaaatgccggccaagctgcgctatctggcggccccggccctgcgcgaaaccgcctacctggaggcggagacccgcaacgacagcgactacccgctgctccccggcaccctgaatacctttctcggcaacagcttcgtcgccagcggccatctgcgcggggtgatgcccggcgagagcttcgaactggcactgggcgccgacgagggcatcggcatcgaacgcaagctggtcaagcgctataccgacagcagcggcctgatcggcaaccgcacgcgggtcaactacgaattccgcatcgacgtgcgcaacaaccacaagaacgccgaacgcgtgcagttcgaggaccagttgccggtctcgcgcaacgagcagatccaggtcaccttgctggaacccaaggcgcaggaagtcaagcgcgaggacgacggcaagctgaagtgggactggaccctgcaacccggcgagaaacgcagcgccaccctgaagttcagcgtggagtatcccaaggacctggcggtcagcggcctcgactagcgctggccaaagcgccggccgcggcataggctcgagcgggtaataagcaaagcagtttttgatatttaccctgcatataacccgacgttatagtcgagccactacaacatgctcaaaggaactgccctgtgaaacgactgttcagcgcctccctgctggccgccggcctggcgctcggcggcgccgctcacgccgcccagcccctgctcaacgtctcctacgacgtgatgcgcgacttctacaaggaatacaacccggccttccagaaatactggaaagcggagaaaggcgagaacatcaccatccagatgtcccatggcggttccagcaagcaggcgcgctcggtgatcgacggtctgcccgccgacgtcatcaccatgaaccaggccaccgacatcgacgccctcgccgacaacggcggcctggtgccgaaggactgggcgacccgcctgccgaacaacagcgcgccgttcacctcggccaccgtgttcatcgttcgcaagggcaaccccaaggccctgaaggactggccggacctgctcaaggacggcgtccaggtagtggtgccgaaccccaagacctccggcaatggccgctacacctatctctccgcctggggctacgtgctgaagaacggcggtgacgagaacaaggccaaggaattcgtcggcaagctgttcaagcaggtaccggtgctcgacaccggcggccgcgccgccaccactaccttcatgcagaaccagatcggcgacgtactggtgaccttcgagaacgaagccgagatgatcgcccgcgaattcggccgaggcggcttcgaggtggtctacccgagcgtgtccgccgaggccgagccccccgtggcggtggtcgacaaggtggtcgagaagaaaggcagccgcgcccaggccgaggcctacctgaagtacctgtggtcggacgagggccagaccatcgccgccaacaactacctgcgcccgcgcaacccggagatcctcgccaagttcgccgaccgcttcccgaaagtcgacttcttctcggtggagaggaccttcggcgactggcgcagcgtgcagaagacccacttcatcgacggcggcgtattcgaccagatctacagccccaactgatccctcgccgcttgacgaaaaagccggaagcgctcgcgcttccggctttttcattcggcttgcagttcagccactgccgcctcagcgaaactcgtgctccacctcggaccagaggctgacccgctgtccgccggcctcgaagaactccatctcgcggcggatgccggcgctgtctcgccagcccggcaggtcgaggacgatcagctcttccaggtgatccatgtagaaggcgtccaccggcgcccacaacctgccgatcgccgcgcggtcgagctcggccaggcacaggttgatcgggtgggacatggagacctggctgaataccacgtggccggcgcggacgatggtcgccgcgacctcgttgcaggcacggaagcgctgctcgaccacctcggcgtcggcatggctgtagggacaggctaggaatatcttgcgcatggttacctcgttgcggaaagcgacgccgcgatggctcgcggcgctcgtcgggggatgtttcaggctgcgtgcagggcgcttttttccgcctcgtcatgctcctgctcctgccgcgcatagcgctcggcggcaggcaccgagatgcggatggcgatgaataccgccagcaggccgccgaacaatttgccgagcaggatcggcaggatcagcgtcggctggaagttggcggtgaatgccaggtgatcgccgatggtggcctgggcgcagacgcccagggccacgcaaagcaccttgtcgcgagcattcatgtatttgaacaggtggtaggtggcgatgatgttcgccagtaccatgacaaaggcggtggcgcccggctgggacagccccaggtaacggccgaggaccgccatcgggcgcttgcagtagcgctggaacaggtagcagatggggaaggtcccggccagcatgatgccgatgtagccagcgatctcgatggcgcggaacaactctttctcgtcggcgaacatcgggtcgaagccccagccgccgaagaccttggtgaagactccggtgaagtgctggacgatggaaagcgccagggccatcttgatgaacgcgtccatcaccttgccgaataccaggaacccggtgaccatcgccgtcgcccggtacttcaggccggcggccagcaggaagcagaagacgaacagcggcgccagcagccgaagcatgtcgaggaagtccagcgacaggtagtgcagggccggcgaaccggtcgataccagttcgcgcaccgggatgtggttgagggtaatcagcagcaacgccgccagcaccgcgaacggaatgctgatcaacccggccatcgcccccagcgccaggtacttgtggtccttgcgctcgagcatggtcaggccgaccgggatcaggtagacgatggtcgcgccggaggtgtagcccaccagcatggcagtaatccacatgtcgcggttggcggtcagggcatcggccaactggtagccgcccatgtccaccgcgatgatcgacagcgcggcgatggatacgtcggaaccgagggtctggaagaacgggccgagggcatgggaaatcgccttcgacagatagggaatggctaccatgatgccggcctgggcgaggaacaccggaccgatggcgtggatgccgttgacgaactcgcggcccagaccgctttccgggcgcaggatggaagccagcgcgccaagtaccgcacccagcatgatcaggtaaatcacatagtttccgaactcggccatctgcgtcgttctcccctcggcaggctcccgtagcgggatgcgttcttctggttgtctggtcgggaggccggccacgccggtcgctccgccgaagcgaacactcgcatttcgcgtgccacaatttggttttcgtgttgatttgaaggttcgttttacctaaattggtcacccatacggtcaagtaggcggccaatccaagagcgtacctgccttacggacctgtgggattttccgccgggcctgcgcaaagcctcgccccgcccccttccgcccagcgccgccaggcgctaccgggcgattcacggtaacaatcgccgcaccaggatgcggcccatgggagaacacgatgcgccccgaggaacgccgccgccacattctcgaattgctgcgccagcgcgagcggatctcggtggacgaactggcgcggaccctttccacctctcaggaaaccattcgccgcgacctcgccgcgctggccgaacaaggcctggtcagcaaattccacggaggggccgccctgccgcccagcggcgagcacgagaacgccttccagacgcgaatgaacgagcacgcccaggaaaaacgcgcagtcgcccgctacgccgccggcctgttcgggcccggtgacagcatcttcatcgacaccggcaccaccaccctgctgttcgcccgcgaactggcgcgccagagccatctgacggtgatcaccaactcgctgttgatcgccggcagcgtcggcgcctccggcaaccgtgcattcatgatcggcggcgagtaccgcccggaatccgaacagaacgtcggcgccctggccatcgagcagatcgcccggttcaacgccgagcatgcggtgatcaccgtcggcgcgctgaacggcgatggcgccatggatttttccatcgaggaagccgagatcgcccgtgccatgatcgcccaggcccgccaactgacggttatcgccgactcctcgaagctcggccggcgcgccctgttccaggtcttcccgctgagccggatcaaccgcctggtggtcgaccgcaagcctaccggggaactctgggaagccctgcaacaggcgcgggtggaagtccacgaagcccccctgcgcaccccgcaggcctgactcccctcgcgcgcagccccggagacaggccggggctgtgccggtggctgcccgtcgattaatcgattgactgtttctctttcagttgccacattaaaacaacaaatttcacatagaattctgtgtgaaaaatcagtgttacggtcaaaaagcaaactgataccaaaagaaacaggcagaaacgatgactgagccgcttgcgacaaagaccgcgatcttcgacgttgcagtgatcggcgctggcgtggtgggttgcgccatggcccgccgcttcgccctggaaggtgcgcgggtggtcctgctggaaaaaagcaccgacatcctctccggtgccagcaagggcaacagcgcgatcctccataccggtttcgacgcgccgcccggcagcatcgaactggcctgcatgcaggagggctatcgcgaataccgcgacatccatgcgcgcctcaacctgccgctgctggaaaccggcgccctggtggcggcatggagcgacgaggatctggcgcgcctgccggccatcgtcgagcaggcccacggcaacggtgtcgatgacgtccgccagatcggtcgcgacgaggtcctggcgctggagccgcagttggccggcaacgtgctcggtgcggtgcgggtccccggtgagcatctgatcgacccctggtccgcgccgctcgcctatctgcaacaggcgcaggcccatggcgccgaggcctgtttcaacgtcgaggtgctggacggcgccttcgacggcggcgaatggctgttgcatacccgccgcggcgatctgcgcgcgcgtcaggtaatcaactgcgccggactcttcggtgaccaactggaacagcgcctgctcggcgcggcgagcttcgccatccatccgcgcaagggccagttcgtggtcttcgacaaggccgccgcggcgctgctgcggcacatcctgctaccggtacccaacgagcggaccaagggggtggtattcacccgtactgtcttcggcaacctgctcgccggccccaccgccgaggaacaggacgaccgcgaacaggcacgggtcgacagcgacaccctgcagcgactgatcgacgccgccgtcgagcggatccccggcctgcgcggcatgccggtcaccgccacctacgcaggattgcgaccggccagcgaaaagaaggaataccgcatccgccaggtcgacggacgcaactggatcagtgtcggcggcatccgttccaccggtctcaccgcggcgctgggcatcgcacgccacgtctatcgtctctaccagggcgagcgcttccacgaagcggttcgcgagccgctctggccacaggtaccgaacctcgccgaacacctgccgcgcgactggcagcgtcccggctacgacgagatcgtctgccactgcgagatggtcacccgccgggaaatcctcgccgccctggaaggcccgctgccagccggcgacttcggcggcctgaagcgtcgcactcgcgcctgcatgggacgctgccagggtttctactgcaacgcgcgggtcgccgagctgagcgccggccgcctcgcccagcccctcgccaccgggagttgccatgagcatcactgaacaggtcgacgtcgccatcgtcggcagcggtcccgccggattggcagccgccatcgaactacgccgccagggcgtcgcccgggtctgcgtgctggagcgcgacggcgaggccggcggtataccccggcattgcgcgcatccgccgttcggcctgcgcgaacacggccgcctgttgaccggcccggcctatgcacagcgtaacgtcgaacaggccgaacgggccggggtggatatccgcctgcgccatagcgtggttgctctcgccgccgccggcctgctgcaactggccaccccggaaggcccgcgcagtctgcgcgcgacacgcgtgctgctggccaccggcgcacgcgagacgccgcgctcggcgcgcctgctgggcggcgaccggccactgggcgtgatcaataccggcgcgctgcaagcctatctccatctgcaaggcctgaagccgttcgaacggccgctgatcgtcggcaccgagctggtcagcctgtccgccgtgatgagttgccggcgtgccggcatccgcccggtggccatgctcgaacgcaacgcacgggccactgcgcgttggccgctatcgttgtttcccaggctgtgcggagtaccgatgcacttctccagcgagctgctggagatcgaaggccgcggccgggtcgaggcggcgcgggtacgcctgggcgacgggcgcgtcgaacggatcgcctgcgacggcatcctcctcagcggacgcttcgttcccgaatcgagcctggtccgcctcagccacctggaactggacccggccagcggcggcccgcgcatcgatcagttcggccgctgctccgaccccgcctatttcgccgccggcaacctgctccggccgatcgagaccgccggctggtcgttccgcgagggacgaaggatcgccggcctgctggccgccgacctgcgggccgaactgccgagtgccgcacctggcatagccatcgattgcagtggtccgctcaagctgtgcgtgccgcagcggctgctggccgacccgacacccggcctggcgcatctgcagctacgcgtaagcgaggccgccagcggccgcctgcggatcctggccgatggtcgcccggtgtgggagcgtgccctgtcctgcctgccggagcgccgcctgctggtgccgctggccgccctgcgcctgccgccggacacccggcgcctggaagtcgctttcctcacctccggccactgaacccgcgaagagaaccgaccatgcgaatcgccgccctcgaccagggaaccaccagtacccgcgtgctggtcgccagccaggacggcagcgccgatattcagttggcgctgcgtcaccagcaacaccatccgcagtccggctgggtcgagcacgatccgctggaactgctggccaacctgcaacgctgcctggaggccagcggccgggtcgacgccatcggcctcgccaaccagggcgaaagctgcatggcctgggacgcccgcagcggcgagccgttgtcgccgctgatcgtctggcaggacaaccgcaccaccccgcacatcgagcgtctacgcgccagcggcgccgaggctctggtcctggaacgcagcggcctgccgctcgacgcctatttctcggccagcaagctgggctggatcgtcgagcaccttccggccgctcgcagggctttgaaggcaggccgcctgcgcctgggaaccagcgatgcctggtttctcgaccgcttgtgcggaaccttcgccaccgacgtcaccaccgcctcgcgtaccgcattgatgaacctcgccgagggccgctgggaccccgacctgtgcgccctgttcggcgtgccgatcgagtgcctgccggaaatccgcgataccgtcggccatttcggggtgatcggcaacaccccgctgacggcctcggtggtcgaccagcaggcctcgctctacggtcacggctgccgccagcccggtgatgcgaagatcaccttcggcaccggcgccttcgccctgactctcagcggcgagcggatcatccgctcgccggagacaggcctgctcgccaccatcgcctggcagatcgatggcaaaccggtgtacgccatggacggcggggtctacgacgccagcgccgcggtcgagtgggccgggcgtctcggcctgttcagcgacttctcggaactggccggcttcgaccggccgccggccatcgagcgcggcctggccttcgtcccggccctgtcgggactcgcatgcccgcactgggaccgcagcgccggcgcgatgtggctgggaatggacgccggcacccgccgcgaggacctctgccaggccctgctcgaaggcgtggtgctacgcagcgccgaggtgatccaggcgatggacggctacctgaaggtcaccgaccgcctgtccatcgacggcggcctggcgcgcagcccctacttcgcccagttcctctccgacagcctgcaacggcgcatcgtcacccagcgcttcgacgaactcaccgccttcggttgcgccgcccttgccgcgcgtggcctcggctacgagctggcggagccgcgcaacacccgcacggagttccagccgcgggtcgacgccggcaccgcccggcgctggcaggtgcgtttcagcgaagcggtggcgcgcacccgcggctggcgctgagccgctttcagcgtcccggccagccggtctcgcgcagcgccgccaggagcctctcccccttcagcgcgggcaccagccggccgtcctcggtgcgcatgtcctcgccggccagcagcacgttgacgatggcttcttccaccgcctccgccgccgcggcgaacaacggcgagatgtggtcgttgttgagcatccgcagcggcgtgctctgcggcaggtccttgcgcgcatagtcggctggcggcaggtcctggttgccggtggcgaaagcgaggaacacgtcgccgctggagtcctcggtaccgccgccggtgcgcgcgacgccgatcgaggcgcgctgcgccaggcgctggcactggtgcggcaacagcggcgcatcggtggccaggatcaccacgatggagcccatacccggggtgccttcctcgctgaacggcgaggggatgtcgcccaaccggcggccgacaggatagccgtcgacccgcagctcgcggcgctggccgtggttggcctggaccagcgcgcccaccgtccagccgccctgctccgccggaagccgccgcgatgcgctaccgatgccacccttgaactcgtggcagatcatcccggtaccgccgcccaccgaaccttcgcggaccggtccggactcggcgcaggccagcgcctcgccgacctggcgggcgccgacgtgctggccccagatatcgttgagcaggccgtcgaaggtctccatcaccaccggcatgcaccagtacagcccgctgtcgccgagttcggcgcgctcctcggcgatcagcgcgtcgcgcaccgcgccgacgctgtgggtattggtgatggcgatcggggtggtcagcaggccggcttcgcggatccactccaggcccgtggcgtcgccgttgccgttgagcacatggcagccggcgaagcagggttgcaggcgcgccgcaccggcgcgcggctggaccagggtgacgccggtgcgaacctgcctgccgtcgatccgctggttcagggtgctgtggccgacgcgcacgccgggaacgtcggtgatcgcgttgaacgggccgggagtgcccaggccgagggtgatgccaagttgtcgagcgcgcatgcggactcctgtttcaaagcttctggaacgccggactgagcttgccgtaggtgcagtagagaatcaccgacaccgccagcagtccgacaatgatcatcacgtccctggccgaggccgccaggaacaggttgagcagcaggtatcccgcgccgctcaccgccagcagcgccggcagcggccacagcggcatccggtagggatgctcgcggtcgcgccgcagcacccggctgaacagcgcgcagagggcgacgatcaggtagaccatgacgatcagcaacacggtgaacgaggtcagttcggccaggttggagctgaagctcagcgccgccgagggaatggcgaggaacagcgtggccagccagggcgattcccagcgcggatggatacgggtgaaggcacggttcaacgctggcatccagagcgcgtcgcgaccgctgctgaagatcacccgggcgctctggatgacgatggcgacgatggcgttgaacaccgagaggaagattcccgcgctgaccaggcgcgacagcgtctcgttgccatggctgttcaacaggtagccgatcggatcggggctggcgagcatcgccgggagcgacggcgcgccgatcagcagcgcggcgagcgggacgatctcgatcagtactaccagcgccagcgaccagagcaccgcgcgatgcacgctgtggccgccgtccttcatgtcctcggcgagcagcaccgcgccgccgaaaccgttgtaggagaacagcgcggtaccgaccgctccgatcaccaatgcccagggtgcgatcgccagcagcccgccgtcgccgactacctgcggctgcagcaggacgctcgccggttgctgtgcatggccgaaaccgaggccgacgatcaccagcagcgccgccacttccagcagcaggcaggtacccgtgacccaggcgttgacgcggatgttgaggatgcccagcaggtagctgaaggcaacgatcgccagggccacggtctgcgcatcgaagtgggtgccgagggcagcgttcaggtaagtcgccgcgccggtggcgagcaccggcgggatgaacagcagcatcgccagcaccgtgaggaaggtggcgtagccggccaagccgccgaacacccgcttggcgtagacatactcgccgccggcggtgctgtgcgccctgcccagctcggcatagcaccaggcgaacatcagcgccagcaccccggccagggcgaaggcccagaaagcgccggtgccggcctgctggatggcgaagggggcgatgacgaagacggaactggcgggagtgactgcggaaacggtgatggcgaccacgtcgaacacgcccagcgtgggtttcagcgcactttcgggcgcgggggaagagctcatgtcgttgtcctctgattgttattgaagttgaggcagtaacggagactcgcggcggccccttgccggggcgctggttatgcgccgactctaggagcgcggaaccggcgggccaatcaccctttggggttacgccccttgacgcggcgggtggaaaagccgcaaaccggagcctgcgaaaacccaccgtggagcgaatacggatgcacaccctgttccgggacatcggcatgcacgccagcctgggccgcgccatcgaacagatcggcggcaaccgtttctggaagcaattgatcctgctgctgcgccagcacctgccgttcgacaacgccctggcgatcttctaccccgccaacggcgtgccggtggccctggaggaatacgacgccgaaccgcacgccgggccggcctcgatgctcgcctacctgaacgggctgtacctgctcgaccccttctaccaggcttgccgggaaggcctggccagcggcctgtaccgcctcgaggagatcgccccggaccatttccggcagagcgagtactacctcagctacttccacgacaacgttctggaggacgaggtgcagttcatcctacaggtgcccggccagggcgcgctgtcgctgtcgctgggcatgcagaggatgttcgccgacgaggaaggcgggatgctcggcttgctctcgagctgggtcctggcgctgatgcagcagcactggcagcaacgcagccagcgcctgttgccggctgcaccgcaggaagagatggccacgcagatacgcgacgccctcagccacttcggcgccagcgtgctatcggaacgggaactggagatcgcccgcctgatccttcgcggctactcgtcgaaggccatggccgagcgcctggcgatctcgccggagacgatcaaggtccatcggcgccacctgtacgccaagctggacatttcctcgcaaccggagctgttctcgctgttcatccagtcgctcgggcacgacccggagaacccctagggatcatggattggcgtagcgccggctgagaccgggcgggatgccgcgagcgtcggtctcggtccatggaccctgcgggctggtggaccagaaccagccgccgtcccaccggtagtaggtgcgctggcggtagtagagatcgcgctcgccacggatcacgtagacccccaggctgccgtcccagacgcccttgccgcctggcggcggggcgaactgcggacgcgagcggctgggctgcgccggagtctgcggttgcggggtgatgcgcggcggggtggcgccgggcgcgctggacggaccgggctgcggctggctctgcggcggcagcgaggccggcggttcgctggtctgcggcggatgcaccacgcacccgccgagaccgcccaggagaatcgccagacccagatacttcgccttcaccgccgcacctccccaaccgattgtcgttatggccgggccgcctggggctggtccgggccgtcgatggtcagcgcttgcgccgacgactgggcagtagacaacggtttgccgcgtccgatccactcgccggagatggcgttgccggcgcgggatacccgtgccaccagctcgacctgcgggaaaccgctgagcttgagctgcggcatcatggcgtcggcatcgctcaggctgacctcggccggcaggtcggcgacggtcaggcgcttcactgccaacggcatcggcgggccgccgacggcgcgggcgaagacgaacacgctgtcgtcggccttgacctggcccttcaccgcgtcgctgatatccaccttcaccgtcagggtcaccccggcggcagcgggcgcggccggcgccggcggagtctgcccggcctcggtcatgcgctcgcgggcgcgctggatgccgccctggatcgccgagcgtgccgggtcctcgttcggcaacaccgacaccaggcgctcccagaagccgatggcgtcggcgtagcgctgctcttcgaaggcggcgatgccgagcaggccaagggtggtcacttcggccgggtcgcccttcagcgcctcgtcggccagggccttgatctgcgcggtcattttcttgccaccggagaaatacagtgcctgcgcccactggccgagcacttccggctgccgcccgctgagttcggcggcgcgttcgaaggcccgcgccgcatcggcgccgcgttcctgggtcatgtaggtgcgaccgaggaagtaccagccctgggcggaatccggctgggcctgtaccgcgcgctccaggcgcgcggtcatctcttccatggagtgcggcgcctgggcgaattcgcgggccagctcgaccttgtcgctggcgccccaatgcaggtacaggccgagcgcgaccaacggcaccagcagcgccgcgaccagcgggaccgcccggcccaggcgcgagctacgctcttcgccgctgccctcggtgtcggcgagcagttcgcgggcagcctcggcgcggccattctccagttgctcggcggtcagcgtgccggcggcctgctggccggccagctcggcgatccgctcctgataaagcgcgacgttcagggcggtacggtcttcctcggcctgggcacgacggccacgcagcagcggaatcagcaggaatgccagggccgccagcagcagcaggccggcagcgagccagaaatcgatcatttgtcgttcttcaacaggttggcgaggcgcgcttgctcctcggcggacagggtggtttgcaccttggcagcggtgcgccggcggcgcaggacgatcacgccgatcaccagcacgccgaacagcagcaaggcgcccggaccgaaccagagcagccaggtacgctcgttgaccggcggcttgtagcgaacgaaatcaccgtagcgggcaaccatgtagtcgacgatctcgccgtcgctcttgccctgctgcaactggccgtagatctgcttgcgcaggtcggcggcgatcggtgcgttggagtcggcgatgtcctggttctggcacttcgggcagcgcagttcctgggtcaggttgcggaagcgttcgcgctcggcgtcgctggcgaactcgtaggtgtcgatggcggcccgggccacgccgcagagggcgagaccgagcagcgcggtgacgaggaaacgcttcatcgggcctccggctcgtccagcagttgctggtacagcggcgccagttgctcgcgccagactttctggtcgaccaccccgacgatcttgtggcggatgatgccctgtttgtcgatcaggtaggtttccggcgcaccgtacacgcccaggtccaggcccagggtgccgtcggcgtcgctgatgctcagcaggtagggattgtgcagctcgttcagccacttgatggcggcggcgttgtcgtccttgtagttgatcccgtagatcaccacgccctgctcgaccagtcgggtcagttccgggtgctcgacccggcacgacgggcaccaggtgccccagacgttgaccagcgccggcttgcccttgaggtcggcctcggtcaggcgccgggccgggtcctgcacgctgggcaggtcgaaggccgggaacggcttgccgatcagcgccgagggcagctcgctggggtccagccagaggccgcggaagaggaacaccgcgacgatcaggaagatccccagcggcagcagcagaatcgctcgtttcaagactcaggctccctgaccggcgaggcccagggcctcgcgcacacgtgttttcaccttcacccggtagcgccggtcgagcgccgccagggcgccgccgaggcccatcagcaggccaccgaaccagatccagcggacgaacggcttgacgtgcacgcgcaccgcccaggcaccgttctccagcggctcgccgagcgccacgtagaggtcgcgggtaaagccggcatcgatccctgcctcggtcatcatcgaactctgcacggtgtacaggcgcttctccggatgcagggtggcgatctccttgccgtcgcggctgacgtggatgctgcccttgtccgaggtgtagttcggcccttcgtggtgcttcgcgccgtcgaagaggaagtggtagccgcccagttcgacggtgtcgccgggcgacatgcgcaggtcacgctgggcgctgtactggctgctgaggacgatgccgatggcgcacacggcgatgcccaggtgcgccagttgcatgccccagtagctgcgggtcaggctgcgggcgccggccagcacgcccttgtgccgggtcttgtcgaggaagtcgcggaaaccggccaggaccacccaggcggacagcaggaacaccgccagcaccgcccagttgaaatcgccgaagtacatcgaaccggccgccgccaggaccgcgctggccaccagcaccggggtcagcatgccgagcagccagcggctcggggtgtccttccagcgcaccagcacgccgaccgccagcgccgccatcagcgccgccatcagcggcaggaacatggcgttgaagtacggcgggccgaccgacagcttggcgccgctgagggcatcgagcagcagcgggtagagggtcccgaggaggatcatcgaggccgccaccaccagcaccaggttgttcagcagcagcagggtctcgcgcgaccacagggcgaagccgacctggctcttgaccaccggcgcgcgcagggcgaacagggtcagcgagccgccgaccaccagcagcaggaaggcgaggatgaacaccccgcgctccgggtcggaggcgaaggcgtgcaccgaggtgagcacgccggagcggaccaggaaggtgcccagcaggctcagggagaaagcggcgatcgccagaagcacggtccagctcttgaacacgccgcgcttctcggtcaccgccagcgagtggatcagtgcagtgccgaccagccagggcatgaaggaggcgttttccaccggatcccagaaccaccagcccccccagcccagctcgtagtaggcccaccaggagccgagcacgataccgataccgaggaaggcccaggctaccagggtccagggccgcgaccagcgcgcccaggcggcgtccaggcggccgccgagcagtgcggcgatggcgaaggcgaaggccaccgagaatccgacgtaacccatgtagagcatcggcgggtggacgatcaggccgacgtcctgcagcagcgggttgaggtcgttgccgtccatcggggtctgcggcagcaggcggctgaacgggttggaggtgatgatcaggaacagcaggaagccggtgctgatcatgcccatcaccgccagcacgcgggccagcatgacctccggcagttgccgggagaagatcgacacggcgaaggtccagccaccgaggatcagcgcccagagcagcagcgaaccttcgtgggcgccccaaacggcgctgaacttgtagtaccagggcagcgcgctgttggagttgccggccacgtaggccaccgagaagtcgtcgcgcaggaaggcccaggtcaggcaaccgaaggcgaaggcgaggaaggcgaactgcccccaggccgccgggcgcgccaggctcatccactggcggtcgccgcgccaggcgccgaccagcggcaggctcgactgcaccagggccaggcagagggcgaggatcagggccaggtggccgagttcggggatcatctacttgccctcctggttgtacgaggtctcgccggcggccttgccgttctcgtagtgcttcagttggccgctgtccttgagcgccttggtgacttccggcggcatgtagttctcgtcgtgcttggccagcacttcatcggccaccagcacgccgtcgccgcccagcttgccgagggcgacgatgccctgcccctcgcggaacaggtcgggaaggatgccatggtaggcgatggtcacttccttggcgccgtcggtgaccacgaaacgcacgttcagcgaatcctcgctgcgttgcagagaacccttttccaccaggccgccggcgcgtatgcgggtgtcggtcggcgcttcgccgttggcgatctgggtcggggtgtagaacaggttgatgttctgttgcagggccgacagcgccaggcccaccgcggcgccgacgcccaccacgatggcgaggacgatgatcagacgtttcttgcggaccggattcactgctgggcctcccggcgcagacgacgcgcctcttcttgcaggtagcggcgccgggccagcagcggctcggcgacattgatcgccagcaccagcaggctgatgccgtaggccgaccagacgtaggggccgtgatggcccatggcgaggaagtcgccgaacgattcgaagctcatcgtgccttctccaccagggccttcacctcggctttcgcccaggcggtgcgggactcgcgcttgagcacttccaggcgcatgcgcaccagcagcatggccgcgaagaagcaatagaagccgaggaccatgatcagcaacggcaaccacatctccaccggcatcgccggtttctcggtgatggtgaaggtggccggctggtgcagggtgttccaccactccaccgagtatttgatgatcgggatgttcaccacgccgacgatggccagtacggcacaggccttggccgcgctgtcgcggttactgatcgcctggccgagggcgatgatgccgaaatagaggaaaagcaggatcagcatcgccgtcaggcgcgcgtcccagacccaccaggcgccccaggtcggcttgccccagacggccccggtaagcagcgcgacgaaggtcatccaggcgccgatgggagcggcgcactgcaccgccacgtcggcgatcttcatcttccagatcagcccgacggcaccggccacggccagcatgacgtagcaggactgggcgaggaaggccgccggcacatggatatagatgatgcggaagctattgccctgctggtagtccggcggcgcgaaggccagcccccagacgcagccggtgacgatcagcagcgccgccgccacggcgaaccagggcagccagcggccgctgatctcgtagaaccacttgggcgacccaagcttgtgaaaccatgtccaattcatcatcaggctctgtttacagggctctttggaaataccgggcagaccttccgctgccagcccgggtcaagcgtgggcggcacagccgcccggtaccgcacgcccgccgatgccttcggcgggcggactcactcgcctacgctgatcttcaggccggcagcgatggcgaatggcgtgagtgtcaatgctagcgccgtcaggctcgccagccacaataaatgtccgctgctgggcagtccctgcagcgaagcctgcagcgccccgctaccgagaatcagcaccgggatgtacagcggcaggatcagcagcgccagcaacaggccgccgcgcttgaggcccacggtcaaggccgcgccgacggcgccgagcaggctcagcaccggcgtaccgagcaacagggaaagcagcagcaccggtatgcaacgggccggcaggcccagcatcagcgcgaacagcggcgacatcaggaccagggccagcccggaaaacagccagtgtgccagcaccttggccagcaccagaagagccagggggtgcggcgaaaggacccactgctccagagaaccgtcctcgaaatcgctgcggaacagcccttccagcgagagcagcacggccaatagcgccgccacccagaccaggccgggcgacaaggtttgtagcaattggctctccggcccgaccgccagggggaacagggcgatgacgatggcgaagaacaccagcggattggccagctccgccggtcggcggaacagcaggcgcgcctcgcgcgccaggagcaggctgaagacgttgctcatgccgggtcgcccagcgccggctcgaccgtcgcgccgctggccgccttgagcgcaccgaggtccagctcgcggtagccggcgggcatctgctgcagactgtggtgggtggtcagcaccaccatcccgccgcgctggcaatgcccggccaggtgcgtttccagttgcgccaccccctgtttgtcgagggcggtgaagggttcatcgaggatccacaagggcggtgcgtccaggtacaggcgggccagcgccacgcggcgttgctggccggcggaaagggtgtggcagggaacgtcctcgaagccacgcaggccgacgtcggccagggcctgccagatcgcctcgcggctggccggctggtgcagcgcgcagagccaggtgaggttctcctcggcgctgagcaggcccttgattcccgcggcgtggccgatccacagcaggctgcgggccagttcgccgcgctgttcggcgagcggccggccgttcaggcggacttccccggcggtcggctgcatcagtccggacagcaggcgcagcaggctggtcttgccgctgccgttgggacccaccacctgcaacatctcaccggcggccaggcgcaggtcgaggcgctcgaacagcatgcgccagtcgcgctcgcaggcgagcccgacggtttccagcaaggggctggctgtggggacttcagcaggatcggacatcgaacaacatcgccaagcgtctctcctcgtcgcggcgccggaggccttcacggaacagaccctaaagtcgggataaacacggccgctatactggtgacgacgcggccagcctgtttgacaggcgcggcattatacacgcccttccccagcctccgcagggtcgtttaagacaggttgttacccatgccagccgagataggcgcttccccgccactacccccggtctccgccccacgcccgctgccgccggcgcaatcgcagggcaacgcccaggccgacgccgagatgaccctgaagctggtgcagaccctggccggcctgctgggcgaaggcgagtcgggcaaggccgaggtgctggcggtcaaggaaggcctggcgaacaatttccaggtcctgctcaagctgaccctggcgaacagcgggcagagcctggtggaagtgcagagcaatcggccgctggtgccgggcaacctgctcaacgtcagcgccaccagcaacaccagcgtggttgccaccctgctcgacagcatggccggcgctggcccgctgagcagcctcgacctggagcaactgccgcccggcaccctgctccagggcaaggtcctgtccagcaccgcgctgccggcggacaaggcccagcaggtggtctaccgggtcctgctgaacctgctcaacacgccgctcgccggcagcaagctgagcctcgactcgccccaggcgctgccggtcggcagcctgctcacggcgctggtgaaaaacagccagcagatcgacttcctgccgctcagcggacgcctcgaccagcttgcgctgggccagcaactggccgggcagagcgcccgccaggcttccctggaaggcctgttcgccgccctgcaggggctgaacggccgcaacgacctgccggacagcctgcgccaggccgtggagcgcctcttcgccggcctgccggaggcgcagaagatgggcgattccaagctgctcggccaggccctgcagcagagcggcctgttcctcgaggcgcgcctgatgcagggcgccaccgatcatctcggccaggacctgaaggccaacctgttgcgcctgttcgcccagctgtcgccgctgccgccaaccggcgcccaggcgccgggcatgttcgccggcaacacggcgaacctggcccaggcgttgccggcctttgtccgcaacgccctgggcaacctgggacagagcgccaacaagacccaggcactgaactttcccctgccgagcaaggttctccagctgttcgacgaggacatggaactggagtcgctgctgcgccttgccgccgcggcaatctcccgcctgcagacccatcagttgtcgagcctggcgcagaccagcaccctgccggatggcacccaactggcgacctggcagatggaggtgcccatgcgccatcagcactcggtggtaccgttgcaggtgaagttccaggaagaacagcgcaagaccggcgaagaggcccgcgaaagcctctggcgcgtcgaactggccttcgacctggagccgctgggaccgctgcacgcccaggcgaccctgctgcgcggcagcctgtccagccagctttgggccgagcgcgacgcgaccgcgcggctggtcgagcatgaactcggccacctgcgccaacgcctgcgcgacgccggcctgaccgttggcgagatcacctgccaacgcggccgcccgccccagggcccgcgagcgaccatcgaacaacgctgggtagacgaaaccgcatgaacagaaagcagtcacccgccccgcgccaggccatcgccctgagctacgacggccaggccgcgccgaccctttccgccaagggcgacgccgaactggccgaggcgatcctggccatcgcccgcgactacgaggtaccgatctacgagaacgccgagctggtccgcctgctcgcccgcctggaactcggcgacgccattccggaagcgctgtatcgcaccatcgccgagatcatcgccttcgcctggcacctgaaaggcaagtgtcccgagggattcgcgccggacgccgcggatggcaaccagatgctgctactcggcggtcccggcgactgagccagcccgcacggcgaaacatccgcacgcacatcagctccaggacctcgccgctgcgcgctaagctgcgcagcctccgacctcggcaaaggagcgcccgatgaacttcgtctttccccacccgttggacaccccgcgcctgcggctacgcactttccgagaggaagacgccgcgccgctgttcgccatgatgtccgacccggaagtcatgcgttactggaacacaccgccgtggacgacccctgcgcaggcccgcgaggcgatcctgcgggacagccaggcgctcgtcgacggcgaatacctgaacctggccatcgagcgtcgagaagacggccaattgctcggcagttgtatcctcttccatttcgagaaaggctcgcgccgcgccgaactcggctactgcctggcacgtgcagcccagggccggggttacatgggcgaggcgctgcgcaggctgctggcgttcgctttcgatgaaatcgacctgaaccgcctggaggcggagatcgatccgcgcaaccggccttcggccgccagcctggagcgcctgggcttccgccaggagggcctgctcgcacaacgctggatcgtttccggagaagtctccgactcggcgctctacggattgctcgccgagcactggcgcaaccgctgaaggaggaaccaccggcagggcccgccatccgtcgctttccacagaacctgtcgttcgcgcaacggtctttagacggcacaccacatgcctgcggaggcatccctcaaatgaaaaaacataccctgttcgccgtagctgctctcggcctgctgttcgcgggcagcaccctgctgcctggcgagctttctcctgtcggctccgcctatgccaagggcggaaatggcggcggcaacggtggcggtcatggcggcggtcatggcggcggcaagggcggcagccatggcggcaacctcggcggccactccagcaaaggccatggttcagccacctccggcatcgccagctcccgcgacagccgcgggctgtcgcaggccagcgcgatctccgccaccacccccggcgatcacaacagcaagggcttgagcaacgccatcggctcctcgaccaagaacgaccgctgaccgccagtggcgaccacgaaaaagccggccttcgcgccggctttttcgtgccccgcccacacggctcaggcgaaaccgccgttgacccgcagcacctgggaattgacccaggccccgtccggcccggcgaggaaggacaccgccgcggcgatctcgtccggctcgccgagacgctccagcggcgccagcctggcgatctggtcgatctgttcggcgctcttgccgttgaagaacagctcggtggccaccgggccgggcgccaccgcgttgaccctgatgtcctggccgcgcaactcgttggccagcacgtgcaccagcccctcgaccccggacttggacgcgatgtacggaccgtagctgggcagcgcccgggcgatcacgctggtggacagggcgatgatccgtccgccgcgctcgacatgccgggcagccaggccgagcacgatgaaggcgccgcgcaggttggtgcggatcacccggtcgaagccctccaggtcgccgtcggcgatcttcaggtagggcatcgtgccggcgctgttgaccaccacgtcgatgcggccgaaggcgcccctggtggcttcgaacagcttgtccatgtcctccgggctggccacgtcgccctgcacggcgatggccgtgccgccggcggcgacgatttcggccacgacctcgtcggccatggtctggttgccggcatagttgaccgcgaccgcgaaaccgtcggcggccaaccgccgggcaatggcgcgaccgatgccgcgggaggcgccggtgacgatggcggcttgggtgatgtcaggcatgctgggactctcctggaatgagcgtggcgacagccacgcatcgacagggaaagtctagaagccgggtattggcggataaacagcagacaaccgtcatgactatccaggatttccggacaataccgatacgcggtcacggcttgcgcgcgatccaggcgtactgctgacgcttctcctcgcccaggcgctggcgtcggcgatgactggcgaacgcatcgccggaacagtaggtgcagacggcgctggcttcgatctgcgccggcccgacgccggcggcctggaacaactggcgacagaaggccaccaggtccagccaggcgccctgctccgcctgccttggctcgggcggagcgaaccggggtggccgctcggggagcggacgacgctggctccagggcggcaccgcgccctcccagaggcggccgtggccgacctgcaacgcctcgatgaacccggcactcacctcgtagcagcaggctttgatcccgggaccgatggcgacccggatgtccgcgctggcgacgccgcgcgcattgaagcgcgccaccgccgcgccgacgataccggcgacgagcccctgccagccgccgtgcagggcggccaccacccgaccgtcgcgactgctcatgagaatcggcaggcagtccgcggtgaccaccgcgaccgccagcggcccttcgctgaaaacaccgtcggcggcatgccgtcccgattccgacaacgagcgcgcgtcgacgatctcggcgccatgcacctgccggcaatggaatatccgttcggagagtgcctggccggcttgctggaagccatgctcgatgccttcgatcgccttgaggatgtcggcctggacggtcatgctgtctcgccatggaaggttggaaaacgaccttacctcatcttcccggaagccgcctcaggcgatgccgcgcaggaggtcggggcagccacgatcacgcttgatcaacgcagccagggcgacctggcccaaaggccggtcggacaccgcgccgatgctcaggccatggcctctgctccactcgaacaacaggcgcttctcgcggcaatcgagttcacccaccagcaggaagcgccggatgctgccgctgcgtcccagcatcgccagcgtgcccttgcagccctggtccaggcggaatccgtcgtagaggcaatagtcgtacgggtaaccctggtccagggagcgccgcagctcccgtcggtccaggcacaggctcaggtggaagtagccgcagcggttgaacagcgctccgtacctgagcagacggccggggttggcgcacagcaccatggcgcgcaggggtattgcaggcatccttgtggcctcctggaaacgtgcgggttgaccaggaccgattctagaaagcgacagccgcgcaattaataggacttttcctctaaatgcctacctgtgatccgaagcttcctcctggcccaggttacgcaggacacgctcggcctggcgcctcaacggctcgcgcaactccagcggctgcctgacctcgaagtcgaacggcaggccgcacaggcgccgggcgaaccagtccaggtcgtcggtgctggcgcgcaacagcgtaccgccatcgacctcggcgagcagaccgaggggctcgccgagcaccgcgaccacctgctccctcgccgcccgcatcaggatttccacagggtaggcgcgcggcatccgggcgaagctctcccgcaggtggcggagggtatcgaaatccgccggtcgctcgaagcgctccgccagcatgcgcggcgcgtccaggcgatcgagacggaacgagcgcaacgcctggcgcaggtggcagaaaccgctgacgtaccagcagccgttgcgataggccaggccgtagggatcgagttggcggagggtttcggcgccctgcgggtcgcgatagcggaactcgacccgcgcacggacctgggcggcttcggcgagggtcgccagcgccgccacactggttcccgcccgggcgcgggccaggtccaggctggcggtctcgcggagcgccacgaggcgccgccgcagcgcaacgggcatcaccctgctcagcttggcctgcgcactttccagggccagctcgctttcgcccaggccgagactgcgcaccgccagcaggccgagggacacggccagggtttcctccgcgctgaacatcagcggcgggagcttgaaaccggccaccaggcggtaaccgccatggcgtccgcgctccgccgagatgggaatgcccagctcctcgagggcgacgatatagcgacgcagcgtccgtccatccacctccaggcgcctggccagctcgctaccgctgagctggccgtggctctgcagcagttcgagcagggcgagcacgcgcaccgtgggcttggacatttttcgatccgccggaaaaaacaggaccgaatatagcctatatcccctctaccctgcgttcagcccggttgcgatgcgcaacgtgcgttacctgaacggagatggaaaatggaacctgtactgttttatggcgtaccccacggctgttccttcggctcgatcgtggccctcgagtggctcggccgcccctatcgcctgtgtcggatcgagatgccgctggagaccggcgagcgcacctacgtgcgcctgaacccggctcgccagacgcccaccctgctcctggaggacggccgcgcgctcagcgaaagcctggccattctccagcacctggcggcgcgcgacctgtgcaggaagctcggttatccgcagggcagcgccgagttcgacgaactgaacttcgccctcgccctcctgcataccgaatgccattcggcctggggagccctgttctatctggaggacgccgacgcaaccacgacggcaagggcgctgacgcgcgcggcgcgagcctatggccggatcgacaagctgctcggcgaccgcaagtggctggccggcgaagggccgagcgtggccgacgcctacctcgcgggtaccgctcgctggggacgggagctgggctacttcgacctgcaacacgactttccgcgcctgcatcgacacctggagaagctggagcaggacccggcggtgcgcttcgcccatgccatcgaggatcgcctgccggcgcagagctgcggggagttcaggggagaggtgacactggcagaagtggcgagccgcctgctcgcctgaaaagcgccagcgccagcgccgggccggcgaccgtcacttgcccttggcttcgtgcaggcgcgccaccagctcggcctcggcctgcgacagaccgcaggcctgggtcaggtcttcggcgctggcgccgagcccgaccaggcgtgcggcctggctgaacgacagcgtggtcggatcgcgctgctccaggcgcgcgacccggtcgggaagcggcgcgagttgcttgccgaggtcctgcaaggcctcgcccatgcgcacgttgacctgctggtaggactcgatgcgcttgctcagctccttgagccggcgctcgcgcgcggcgccctcctccgcctgctgcgccagcgcagcttgcaggcggcgcaattcacggcgcagccacaggcacgccgccgccaggccgaggcaggcggcgagcgccagtgccagcgcgacgacctccatctcagcaggccctcgtgtcggtagaacgcatcagatgctgcccagctccgaccattcttcctcggtcatcatcttgtccagctcgaccaggatcagcagctcgccgttcttgttgcagacaccctggatgaacttggccgactcttcgttgccgacgttcggcgcggtctcgatttccgactgcttcaggtagaccacctcggcgacgctgtcgaccaggatgccgaccacctgcttgtccgcctcgataatgacgatccgcgtgttgtcgctgaccggcgcagggtccaggccgaagcgctggcgggtgtcgatcaccgtgaccacgttgccgcgcaggttgatgatgcccagcacgtagctcggcgcgcccggcaccggggcgatctcggtgtagcgcagcacctcctggacctgcatcacattgatgccgtagctctcgttgtccaggcggaaggtgacccactgcaggatcggatcttcggcgctttgcgcggtggctttgctcattcccctaacctctcgaaaaccgccgcaagtggcggaagctgtctatcaatggtcgccgtgcaggcgcttgacggcgccgctggcgatcagttcggcgagcgccgccacatccagcagcgcacacatgtgttcgatgaccgtgccggccagccagggccgctggctacgctggctgcgccatttcacctcggccgggtcgaggcggatcgagcggctcacctggtgcaccgccagcccccactcgtagccctggaccgagatcacgtacttgaggccgtcgcgatagtcgtcgcggtagcgttcgggcatcacccagcgtgcggtgtccaacaccttcaggttgcccgcctgcgacggcaggatgccgaggaaccagtcgggctggccgaacaacggggtcagttcctggttctccagcggatagatcgagccgaggcacaccagcggcaccgccagggtcagcccggcgacgtcgaacagcaggcactcgaagggctccgccgcccaggccggacgaccgtcgtcgagcagcggcaggtcgagcagcggcggctcgccgacgctcgccggggcgctcggcacgcgcaactcgatgacttcgtggggccgtggctcgaccggcagctcgcgcaacgtcgtcggttcgtcgagcagggccgccggcgccggcggaaccagacgcgcatcgcggacctgctcctcgagcaccgcggcctcgaactcgtcgaacccggggtcgaccggcagcgtttccagcgccggggccggtgtcgccacttcggcgaccgccagcgcgacaggcttcaacggcgcgggcgcaggcgctggcggcgtctcgacgagaggttccaggtcctcgaaagtggcctcctggagcaacgcatccaggtaggactgcaaggccagttgcgaacgggtggcggtggcggcgctcatgtgggtattccgcgacaggggtctacaacggttatcggccgcactccggtgcggcttgaatgcgcctgtcggcgcggcgaccggcgtgccatcaggccacccgggtggccggctgctgcgccagcagatgcttgagcaaggcgcggtaggcgatcaccccgcgactcttgccgtcgtgctgcgacggcgtgaccccggcccggctggcatcgcgcaggcgggtatcgatgggaatgaacgcctgccacaggttgtccgggtagttctcgttgagaatccgcagcgtgctcagcgaagcctgggtccgccggtcgaacagcgtaggtacgatggtatagggcaacgcctgtttgcgcgaccggttgatcatcgccagggtgttgaccatccgctccagccctttcaccgcgaggaactcggtctgcaccgggatcaccaggtgctggctggcggccagggcgttgaccatcagcacgccgagcagcggcgggctgtcgatgatcgcatggtcgaaatcctgccagagctgcgccaggctcttcgagaccaccaggccgagaccgctcttgcccggcgactggcgctccagggtggccagcgcggtactcgacggcagcagggaaatgcgttcgttgctggtgctgcgcagcagcgaggccggcagcccctcggggacgttgccctggtgcaggaacaggtcgaaggcgctgtgctcgagggtgtccgggtcatagccgaaatagctggtcatcgagccgtgggggtccaggtcgaccacgaccacgcgcttgccggcatccgccaacaggccggccagggcgatggacgaggtggtcttgccgacccctcctttctgattggcgactgcccagactttcattgctctactcttcctggcatgggtctacccggttggggccgcgctaatggccagttcggccccggcgcccgtacgcaaaccatggttcgcgcgctcatggcgaaggcgacggggaattgacggttgccggcgcgggcgccggcgtaccgccagtatctgcagcttgcgtgccagctgccgagcctgcgtggcggagcgccgaatccggttgcgccttgccgctgccgaccccgctgacgctgcgtcgcacctccaggttgcgcgagatcaccagcaccacccggcgattcttcgcccgcccctcggcgctggcattgtccgccaccggctgaaattcaccatagcccaccgcagccatccgcgacggctcgaccccatcgttgccgagcaggcggacgatgctcgccgcccgcgccgccgacagttcccagttggtgggatagcgcgggctatggatcggcacgtcgtcggtgaagccctcgacatggatcgggttcttgtagggcgccaggatcttggcgaccttctcgacgatatcgaaggcggcatcgttgggcagcgcatcgccgctgggaaacagcaggctggaattgagagtgatctcgatccacagctcgttgccgcgcacgctcaactggtcggaggcgatcaggtcgccgaaggcatcgcgcacgctgtcggcgatccgctccagcgagtcggcgctggccgcgttgtcgctgggctgctcctcgacgctggtgcgctccggctcggtggtgcgcggccgctcgtcgccgatgggaatcggcttcaacgagcggtcgggctggttgaacacgccggtgagggtctccgagaggatcttgtacttgccctcgttgatcgaggaaatcgaatacatcaccacgaagaaggcgaacagcagggtgatgaagtcggcataggaaaccagccagcgttcgtggttctcgtgttcctcctggtggcgacggcggcgctgcatgctcggctccggtcagtccatgaagccttgcagcttcaactcgatggaacgcgggttctcgccctcggcgatggacagcaggccctccaggagcatctcgcggtagcgcgactggcgcagtaccagggttttcagcttgttgccgatcggcagcaggagcaggttggcgaagccgacgccatagatggtggcgacgaacgccacggcgatgccgctgccgagctgcgccgggttggccaggttgcccatcacatggatcaagcccattaccgcgccgatgatgccgatggtcggcgcatagccgcccatgctctcgaacaccttggcggcctgcaggtcgcgactttcctgggtgaacaggtcgacctcgaggatgctgcggatgacttccggctcggcgccgtccaccagcagttgcaggcccttgcgcgcatagggatcgggctccgcatcggcgatgctctccaggccgagcaggccttccttgcgcgcggtcatgctccaggagacgatccggtcgattcccccggaaagatcctcgcgcggcgggaagaacacccagccgagcatgcccaggccgcgcttgagcacgttcaccggggtctgcaacagcgccgcggccagggtgccgccgatcacgatcagcgccgccggaccgttgagcagggctccggcgtggccgccctcgagaaagttgccgccgacgatggcgacgaacgccagggtgatcccgaccaggctgagcacatccatcagcgcgtcccctcggctcggcgaaggcgcgcgcagctcgtcacgtgggtggccatcgaaggcagtctcctcattcctgcacgcacgcttactggcacgcctcgaccaggtgccggccgatgtcgtcgagcccgtacaccgcgtccgccaggttggccttgaccacggccatcggcatcccgtagatcacgcaactggcctcgtcctgcgcccacacctggctgccgccctgcttgagcaggcgcgcaccctcgcgcccgtcggcgcccatgccggtgaggaccaccgccaggaccttgtcgttgtaggccttggccgccgagccgaaggtcacgtcgacgcagggcttgtagttcaggcgttcgtcgccggggaggatgcgcaccgtgccgcggccgtcgaccatcatctgcttgccgcccggcgccagcagcgccaggccgggacgcaggatgtcgccgtcctccgcctccttgacgttgatccggcacagcttgtcgaggcgctcggcgaaggccttggtgaaggccgccggcatgtgctggatcagtaccagcggcgccgggaagttggccggcaactgggtcagcacccgctgcaaggcaaccggtccaccggtggaggtaccgatcgcgaccagccggtaggccttgcgcttcggcgccgccgaggtcgacgccggggccggcgacgcgccggcaccaacacgcgcgctcgcgccgacgctggaggacgacgccggcgcatggctggacgaggtggccgaaggcagcggcggcaggctgatcgagcgacgattgctacgggcgatggtcaggaccttctcgcagagcaactggcggaccttgtccgggttgcgcgagatgtcctcgaaattcttcggcaggtagtcgaccgctccagcgtccagtgcatccagggtcacccgcgcgccctcgtgggtcagcgaggagaacatcaggaccggggtcgggcaacgctgcatgatgttgcgtaccgcggtgatgccgtccatcagcggcatctcgtaatccatggtgatcacatcgggtctcagggccagcgcctgctcgatggcctcgcggccattggtggcggtgccgaccacctggatctgtccatcggcggagagaatctccgagacacggcggcggaagaaccccgaatcgtccaccaccaggactttgactgccatagctactcctcagagggcgacgctcctgcgccgccggaaacccatacgcggcgtcagatgcgccgtgcgtaacgcttgagcatgctcggcacatcgaggatcagggcgatgcgcccgtccccggtgatggtggcgcccgccatgccgggggtgccctgcaacatcttgccgagtggcttgatcaccacttcttcttgtcccaccaactggtcgacgacgaaaccgatgcgctgggtgccgaccgacaggatcaccacgtgtccctcaccctgctcttcgtgggccgcactcggcaccagccagcgcttgagatagaacagcggcaaggccttgtcgcggacgatcaccacttcctggccatccacgacattggtgcgcgacaggtcaagatggaagatttcgttgacgttgaccagcgggaaggcgaacgcctggctgcccagcatcaccataagggtaggcatgatcgccaaagtcagcggcaccttgatgacgatcttcgagccggaccccttctgcgaaaacacgttgaccgtgccgttgagctgggaaatcttggtcttcaccacgtccatgccgacaccgcggccggacacgtcggaaatctcggtcttggtcgagaaacccggggcgaaaatcaggttgtagcactccaggtcggtcaggcggtccgccgcatcgcgctccagcaggcccttctccaccgccttgttgcgcagcacctcggcgtccatgcccttgccgtcgtcggtgatcatcaggaggatgtggtcaccctcctgctccgctgacagcaccacctggccgacccgcggcttgccggcggcctcgcgctcctccggactctcgatgccgtggtcgacggcgttgcgcaccaggtgcaccagcggatcggcgagggcctcgaccaggttcttgtcgaggtcggtctcttcgcccaccagctccaggttgatctctttcttcatgttccgcgccaggtcgcgaaccaggcgcgggaagcggccgaagaccttcttgatcggctgcatgcgggtcttcatcaccgacatctgcaggtcgccggtgaccacgtcgaggttggccacggccttggccatggcctcgtcgccactgttcaggcccaggcgcaccaggcggttacgcaccagcaccagctcgccgaccatgttcatgatctcgtcgagacgcgccgtatccacccgcacggtggtctccgcctcgctcgccgccggcctgtcgggcgccgccggacgcgcggcggcggccttggccggagcgaccggtttcgccgcgggactcttcgccgcgatgttcttggctaccgccgcggcggccgccacggcctcggaggcgccgttgaacttgcccttgccgtgcagttcgtcgagcagcgactcgaactcgtcgtcgctgatctcatcgccgcccgcggcggccggcgccttgccctgctccgccggcgcagccgctggagccgcggcagccggtgcggcgggtgtgccggcggcttccgggacatcgccgaacttgcccttgccgtgcagttcgtcgagcagcgcctcgaactcgtcgtcgctgatatcgtcaccagcggcagccgcggccggctcgaccgcctcggcggggacttgcgcaggctcggccgagaccgccggcgggacgaacttgcccttgccgtgcaactggtcgagcaacgcctcgaactcggcgtcgctgatctcgtcgccagcgggagccgcgggcgcttctgcaacggcggaggccggcgcttcgtcgccctgcagagcatccagcaactgctcgaactcgtcgtcggtgatatcgctggaggcactctgcgcgggcgcttccggcggcgccgcgggctcggctggcggaacggccgccggcggcgcttgcacaggttccgcgggctcggcgccctcgggctcggccaggcgggcaagggccgccagcagctcgggcgtcgccggggtcggttcggactgctcgcgcacctggtcgaacatcgcgttgaccgtatccagcgcctgcagcaccacatccatcagttcggagctgacgcgccgctcgcccttgcgcaggatatcgaagacgttttccgcaatgtggcagcattccaccagcgcgttcagctggaggaagccggcaccgcccttgaccgtatggaacccacggaaaatggcattgagcaggtccatatcgtccggccggctctccagctcgaccagttgctcggacaattgctcgagaatctcgccggcctcaaccaggaagtcctggaggatttcttcatcggcgtcgaagctcattcggctgctcccagagacgtgttactcgaaaggatcggcaggaccgctgtcctgccggaaataccggcccggctttccggaccgacttcagcccgcccgccgggatcaccggcatgacgaaggctgtgccagcagcccgcggatgccagcgttcaatgcttacttaacggcagcgatgccgcagtcttgagccgggcggatcagaaacccaggctggacagcagatcgtccacgtcatcctgcccggacaccacatcctctcgtttttccgcggcgacctgcggcccctcgcccttggccgaacgctccagcgcggcctggtggcgcatgctcacgtggtcgtgctcgatcccggcgtaacggtccacctggccggccatccagaccagcttcacgaggttgctctcgacctcggtgaccagcttggtgacacgcttgatcacctggccggtcaggtcctggtaatcctgcgccagcaggatgtcattgagctgcgaggacaactggccggcgttctcgccgctgcgcacgaggaactgttcgatgcgcttggccagctcgcggaagccgtcagcgtcgatttcccggcgcatgaagcgttgccactcctggtgcagctcccgcgaatcgtcgcccaactggttgaccagcggggcgctctgctccaccaggtccatggtccggttggcggccttctcggtcatttccaccacgtaggaaagacgatcggtggcatcggcgatctgcgacatttcctgcgcgtggggggaatgcgggtcgatctggaaatcgacgatggcgttgtgcagttcgcgggtcagcttgcccacttcctggtagaggccacggtccctggcctggctgagctcctggatcaattgcaccgcctgctggaagtgcccccgttcgagacagtccaccagttcgcgcgcatgttttttcagggtcgattcgaattcgtcgcccgtggaatcgttaccaagcaccatgacaccctcttggccggcttcagccgttgacccgctcgaaaatcttctcgatcttttccttcaggacctgagcggtgaagggtttgaccacatagccgttgaccccggcctgggccgcttcgatgatctggtcgcgcttggcctcggcggtgaccatcagcaccggcaggtgcttgaggcgctcgtcggcgcgaaccgcgcgcagcagatcgatgccggtcatgcccggcatgttccagtcggtgacgagaaagtcgaaattgccgctgtgcagcatcggcagcgccgtggtgccgtcgtcggcctcggcggtattggtgaagcccaagtcccgcaagaggttcttgatgatgcgtctcatcgtggaaaagtcatccacgatgagaattttcatgttcttgtccaagtaaacctccgtacagaccagagcgcgccccaggggacgcgccacacattcttttgcgttaacggttacaagctgcggtcgaggccggttcaggccgaccgccaatcggccaggcgcgcgcgcaaacgcgcggcgcactggctgtgcaactggctgacccgcgattcgctgacgcccagtacctcgccgatctccttgaggttgagttcctcgtcgtaatacaacgccagcaccaggcgctcgcgctccggcaacttggcgatggcatccgccagggccgcctggaaacgttcgtcgagcaggccgtggatcggttcgttgtgactgaggctggtgtcttccggcaatccatgttcgccgtcctgcaacaggtcgtcgaagctgtacaggcggctgccctgcgtgtcgctgaggatgccgtagtaatcttcgaggctcaattggagttcggcagcaacttcgtgatctttagcgtcgcgtccggttctcgcctcgatcgcgcggatcgcgtcggtcaccatgcgcgtgttgcggtgcaccgaacgcggcgcccagtcgcccttgcggacctcgtcgagcatggccccacggatgcggatgccggcataggtctcgaagctggcgcccttgccggcgtcgtatttcttcgcggcctcgagcaggccgatcatgccggcctgcatcaggtcctccacctgcacgctggccggcaggcggccgagcaggtgataggcgatgcgcttgaccagtggtgcgtaacgctggatcagttgctcctgggagttctgcgcttgcgccttgctatacatacgcactccagaggccgctgtcatacggccgaacctgtcgcggggtgttggaccagtcgttcgacgaagaactccaggtgcccgcgcgggttggccggcagcggccagctatcgaccttctgcgcgaccgccttgaaggccagggacgccttcgagcgggggaatgcctcgtatacggctcgctgtttctgcacggccttgcgtaccgactcgtcgtaagggatgacacctacatactgtagtgcgacgtcgaggaaacggtcagtgaccttggtcagtttggcgaacaggttgcgtccttcctgcgggctgtgggccatgttggccaggacccggaagcgggtcatgccgtggtcgcggttgagcagtttgatcagggcgtaggcatcggtgatcgaggtcggctcgtcgcagacgaccagcagcacctcctgcgcggcgcggacgaaactgaccaccgaatcgccgatcccagcggcagtgtcgacgaccaggacatcgaggttgtcgctgatatcgctgaacgcctggatcagccccgcatgctgcatcggcgagaggtgcaccatgctctgcgtgccggaggccgcgggaacgatgcgcacgccaccgggaccgaggaggaggacatcgcgcagttcgcagcgtccctcgatcacgtcggccagggtgcgcttgggcgtgagtcccagcaggacgtcgacgttggccaggccgaggtcggcatccagcagcatgacgcgacggccgagatcggccagagccagtgccaggttcaccgacacattggtcttgccgacgccgcccttgccgccagttactgcgatcacctgtacgggatgcatgctacccatctgcttcataccttgtgttgtcgtcttcccggaacgccccttccagcgctctccggtattggcgggaacgatgcgccatcgctcccggcccggcggaagccaccttcgcttccgtcacccgcgccacgcgcggttcttcccacgtcctcagccggcacgccgcgccggttgctggtagagcccggcgaacagctcggccatggcgtcctcgctgggctcttccggtgcctgcaggctcaccgcccggctgaccagttggtgactgcgcgccacctgcaggtcgtccggaatccgcggcccatccgccagataggctaccgggagacgctgggcgatagccagcgccatcgattcaccgaggctgcccgcctcgtccagcttagtcaggatgcaacccgccagcccgcagtgccgataggtctggtaggccgacttgagcacctggctctggctggtggtggccatcaccaggtaattcttcacgttcaggctcggcgacgccagtgcctcgagctgcatgcgcaatgccgggtcgctggccggcaggccggcggtatcgatcagcaccatgcgcttgcgcgccagcggcgccagggcctggatcagcgactggccgggatcgaccagtgtcaccggtacgttgaggatccgaccgagggtcttgatctgctcctgggcgccgatccggtagctgtccatgctcaccagcgccaggctctgggcgccgtacttgaggacgtagcgcgcggccatcttcgccagggtggtggtcttgccggcgcctgccgggccgaccagggccagtacgccgcccgcgtcgagcgggtcctgctcgggggtctgcacggcacgcgacaggtgcgccaacagcatgcgccaggcctggcgcgtatcgcccaccgcggcgacccgctccagcaacggcttgctcagctccgccggcaagcccatgcgctgcaggcgccgccagagattggcctgctgcggacgctggtgctgcaactggccccaggcgatggaacccagttgtacctcgatcagctcgcgcaggccgttcagttcgaaacgcattgcctcgagggtctggccgcccgcctggggcttggcctgcgccgccgtcatggactcggccagggtcggacgcgccggcttctcctcggcgaacaattgacggtccttgcgctggttttccgccggacgcgccgtcaactcggcgcgcgcctcggcgatccgcgcctgggtcttgcgcagctccacttccagcgccgggttgggcttgctcggcgccggcggggcctggtaatccagcgccgcggtcagctcgatgccgccggcgacccggcggttgccgagaatcgcggcgtccggacccagttcgtcgcggaccagtttcatggcctggcgcatatcggcggcgaagaagcgtttgacttgcattgcccgaacccctcagttcagtagtcttgccggcaacctcaggttgcccggtgtgccggccctggagccggcgcagccctcgttcagttctgtcccaccgtcgcgacgatggtgacttgcttgttgtccgggatttcctggtaggccagcacatgcatgctgggcaccgccatccgcgcgaagcgcgacatcatcgagcggatcggtccggcaaccagcaggatcgccggcttaccgagcatctcctggcgttgcgcgctctcgatcagcgagcgttgcagcttctcggccatccccggctccagcaacatgccgtcctcggagccttgtccggccttctgcatgctgttcagcaaaatctgttccaacctcggctcgagcgtgatcacaggcagctccggctcaagcccgacaatgctttgcacgattgcgcgggacaacgcgacgcgaaccgcggcgaccatcgcgccgggatcttgactccgtggagcgacgttggcgatggcctcggcgatggtacggatgtcgcgcaccggcacctgctcctggagcagcgcctgcaggaccttgagcagggtggacagggaaatcagccccggcaccagctcttccgccagcttcggcgagctgcgcgcgagcaattgcaggagctgctgcacttcttcatggcccagcagctcgtgggcgtgcttgtgcagcacctggttcaggtgagtggcgaccacggtgctcgcatccaccacggtgtagcccagcgactgcgcctggtcgcgctggccgggctcgatccataccgcctccaggccgaaggccgggtccttgccggcgatgccgttgaggctgccgaatacctggccggggttgatcgccagttcgcgatcgggatagatctccgcttcggccacgctgacccccatcagggtcaggcggtaggcgttgggcagcaggtcgaggttgtcgcggatgtgcaccgagggcatcaggaagcccagctcctgggacagcttcttgcgtacgcccttgatccgcgccagcagttgcccgccctggttgcggtcgaccagcgggatcagccggtagccgacttccaggccgaccatgtccaccggggtgacgtcgtcccaacccagttccttgacctcctgggcgcgctgcgccggcagcagctcctgctggcgctgcacctcctgctcggcgacctgcttggccttgttctgccggtgccagatccagtaggcggcagcgccggccagggcgccgaggccgatgaaggaaacatgcggcatgcccggcacggcgcccatggcgatcaggatcgccgcggaaatcgccagcgccttgggcgaggcgaacatctgccggttgacctgctggcccatgtcctcggaactggagacccgcgtcaccatgatcgccgccgcggtcgacagcagcagcgacggcagttgtgccaccaggccgtcaccgatggtcagcagggcgtagaccttgccggcgtcgccgaaggacatcgaatgctggatcatgccgatggcgacgccgccgatcaggttgatgaagagaatcagcaggccggcgatggcgtcgccgcggacgaacttgctggcaccgtccatcgaaccgtagaagtcggcctcctgggccacctcgctgcggcgcttcttggcttcctcctgctcgatcaggccggcgttgaggtcggcgtcgatggccatctgcttgccgggcatggcatccagggtgaagcgcgcgctgacttcggaaatccgcccggcgcccttggtcaccaccacgaagttgatgatcatgaggatcgcgaacaccaccaccccgaccacgtagttgccgccgatcaccacttcgccgaaggcctggatcaccttgcctgcggcgccatggccgtcgtggccgtggagcagcaccacgcgggtcgaggcaacgttcagcgccaggcgcaacagggtcgccaccagcaggatggtcgggaacacggcgaagtccagcggccgcagggcgtacacgcagaccagcaggacgacgatggacagggcgatgttgaaggtgaacagcacgtccagcaggaatggcgggatcggcagggtcatcatcgccagcatggccagcagcaggaccggcacgccgaggctgccgcgccccagtcccgccaggttgctgcgcacattgctgatcagttgcgtgcgatccactctcgactcccctgccctgcgtatggcgcccgtaggtgggcgccgaacaaacttttgacgccggaatgcgcgtcgggcgggtcattgcaggaaccgttccaacttttcaattcattgattgaaaagggttttcgccaatcaccaactaccggaggcgccaccgccgccactcgagcctccgccgccggagaacgagtccgaagacgaactggacgaactggacgacgaggaacccgatgagctagcgtaatcgccgccgcgtcgacgccctccccccgagccgccggcgctgaaattgcaaccgatgagcagcggcaggcaagcggcgggcaggatgatcagcgcctcgatgctgttcagcgggtcgtccaccagcaacagcagacactccagggccagggtcagcagcaggccgagcaggcccggcaggtaggcccagcgccgtcctctgcgcagcccctgccaggcaccggccagcatcagcagggtcagccccagcgaaagcggcacggccaatccgtaatggagcaccggcaggccataacggcggtaggcccagaacagccccagcgcatagagcacaagaatggcgaagaaccagcgggcaccgcgcgaatacttgagcaacgcgccgaagccgacgcccaggaccgccaccatctccgccagcgccaccatcgcccctgccggccagtgccgccccagtgccaacgccgcagcgagcgccactaccgcccccagggtccagtaccaggcgcgcggacgtaccagcagcgccaccccgccgagagcgccgagcaggaatgcgatagccagggtctgccgtaccgcgccgggctccagcgggtcgcgcggcggcggcggcaacgcctcgccgtcgatcagtcgtaccaggcgctgcgccgccgcttccaggccgccggcgtagtcttgctgacggaacgcaggggtcatgtattcgcggatgatccgcccggcatcgatgtcggtgatcgttccttccaggccataaccgacttcgatgcgcatgcgccggtcgtccttcgccaccagcaccaggacgccgtcatcgatccccttgcgccccagcttccacgcctcgaagacccgcgtcgcataggcctcgatgctgtccggataggtgctgggcaccatcaggatcgctacctgggcacccttccgggcctccagcgcggccagcgaagcttccaggcgggcacgctcggcggcgtcgagggtcgcggtaaggtcggtcacccgccgcgccagcgccggaacctccgcggactcgtagcccgcatcgcgcgctgcctcggcctcggcgccgaccgccgatgcctccacggcctcctcctcgacatcggacgctgccaccgcgacggtgaccggcaccgtcgcggtggcaacggagggaatcgcggcggcgcagagcagcatgccgaacaggcgaagcatggcgagataacgcgtgattgcagacatccttgtctccgaatgaaatgaacgggaacccattaccaactgcccgaggcaccgcctccgccgctggaaccaccgcccccggaaaagccgccggacgacgaggaggaagaggaggaggaaccgccgccggagcttcccgacgagcctccaccccccccactcaggcgtacctggccgaacaccagcagcccgagcatgagctggaacggtagcagggccagccagaccagcggtgcgtccaggccaccggacagcaatccgagcagcaggtaggccgccagcaacgcccacagtcggcggtggaaacttttccgccgctcgcgccatagcgagcgcatcaggcggtagttcgaccagcagagaaccgccagcatcagcaccccggccggccacagcaggccgtagatgaaggacaccgcgctgaaccaatgcgccgccagcccgagcagggctacatagaccagtacgccgatcaccaggtagaaggccgggcgcaccgtccacagcgcgccgaaggtcgcgccgccgaccagcatgcacagcggagcgaccagcagcacgctcatccattcgccggaagcgccggccagcgtgcccagcagccagcagagcagcgccccgccgagcagccagggccagcgcagcgcccgggcactcaacagcactccggccaacgatccgtagatgaaggcgaccagcagcgcccaggcttccgccggcaattgccccagcgagactttcggcgcacccgacgacgcggccgccgacagcgtttcgccgtcgaccaggcggatcagctcgtccaccgcggcctcgatcccgccggcgtagtcgccctcgcgaaatgccggggccatccgctcgcgaatgatccgtccggcgaccacatcgggcaccgcaccctccaggccgtagccgacctcgatgcgcatgcgccggtcatccttggccaccaccagcagcagaccgtcgtcgaccgccttgcggccgagcttccaggcctggaacaacttgtcggagaaggcttcgatatcgagggtaccggtagtcggcagcatcaccaccgcgatctgcgcaccgcgtcgccgctccagcgcctcgagcttctccaccaggcgttggcgcgtcgcctcgtccagcgtgtgggtggcatccaccacccgctccgacaggggcaaggcgacccattccgccggcgcttcggcgtgcgcaggcatccagggcagcagccaggccagggcgagcaaaaggaggacaggcgggaaaatacgatcagacaaggttcgatccatgaacggcaaagctctcatcccgagcgggtatcggccaaggctgccacagcgcggcgcgtagctccagccaggtcactcgtcgcgacgcaggtccggcgggatcggcaggtccttcaacgggctcggccgcttgcccttgccggcctggtactgcttgagctggtagacataggccagcacctgggccacggcgagatagagcccggcgggaatctcctggtccagctcggtggagtagtacaccgctcgcgccagcgccggcgactccatgaccatcaccttgtgctcctgggccacctcgcggatcttcagggccaggaaatcgttgcctttggccagcagcagcggcgccccgccgcccgccgggtcgtacttcagggctacggcgaagtgggtcgggttggtgatcaccacgtcggcctccggcaccgccgccatcatccgtctctgcgccatctcgcgctgcatctggcggatcttcgacttgacctcgggcttgccctcggagtccttgtattcgtcgcggacttcctgcttggtcatcagcagcttctggcggttgtcccagatctggtagggcacgtccaccgcggcgatcagcagcaggctgcaggccatccagaaggcgctccagccgaccacccgcacgctgtgcaggatcgcctgctcgagcggctggtgcgccagcgccaggagggcgtcgcggtcggcggagagcaccagcagggccaccgccagcaccaccaggaacttgatcagcgccttgctcagttcgagcagcgacttggcggaaaacatccgcttcagccccgacagcgggttgagccggctgaacttgggttgcagggcgtccatcgagaacagccagccgccgagggcgatcggcccgacgatcgccgccaccagcagcatcagcaggatcggccagagcccctgggcagccaggtaggccgaagcgccgagcaactgcagcatgctctcggtattcatcgcggtttcccgggacagctcgaaattgctgcgcatcaggcgcaacagggcgcccgccaggtcggcgccgtagatcagcaggccgccggcgccggccatgaggatggccagggtgttcagctcccgcgaacgcggcaactgccctttctcgcgcgcctcgcggcggcgtttctccgtgggttcctctgtcttgtcctgcccgctctcgctctcggccatggctatttcgcccgcaccagttcacggaggaattgcagggcctcgccggccagcacctggtactggctgagcaggtcggcggtgccgatccagaggatcaccaggcccagcaccagggtcaacggaaagccgatggagaagatgttcagttgcggcgccgcgcgggtcatggcgccgaaggcgaggttcaccaccagcagcgcggtgatcgccggcagcgccagcagcagtgccgcgcccatcacccagccgagcttgccggcgatgatccagaaatggttgccgctcaggccctcgcccaccggcagggtgacgaagctctcggcgattacctcgaacactaccaggtgtccgttcatcgccaggaacagcagcgtcaccagcatggtgaagaactggccgagcaccggcaccgagacgccgttggccgggtcaaccatggaagcgaagcccaggcccatctgcatcgagatgatctgcccggcgatcacgaaggcgtggaacagcaactgcagggaaaagccgagcaaggcgccgaccaggatctgctcgccgatcagcagcatggccttcatgctcagcgcgtccacctgcggcatcggcggcaggttcggcaccagcaccacgcagacgcccagcgccaggtacagtcgcacccgcaccggcaccagctgggtgccaatcaccggcatggtcatcagcagcgccgcgacccggaacagcggcagcacgaagctggcgatccagccgccgatctgcgcgttggtcagctccagcatcagccgatcagcagcgggatgttgccgatcagcgtctgggtgtactccatcagctgccgcagcagccaggggcccagcacgatcagggtgagcaggatcaccatcaggcgcggcaggaagctcagggtctgttcgttgatctgagtagcggcctggaacatcgccaccacgagaccgaccagcaggctcggaaccaccagcacgccgacgatcatcgccgtcagccacaacgcctcgcggaacaggtcgagtgccacctcaggggtcatgtctctctccagcgcgccagcggcgcgtcaagccggcggcaccgctagacggtgccgaaactgcccgccagcgtcccgatgatcagcgcccagccatccaccaggacgaacagcatgatcttgaacggcagggaaatgatcagcggcgacagcatcatcatgcccatcgccatcagcacgctggacaccaccaggtcgatgatcaggaacgggatgaagatcatgaagccgatctggaacgcggtcttcagctcggacgtgacgaaggccgggaccaggatggtcagcggcgtcgcctccgggctgccgatgtcggtgcgcttggacaggcggacgaacagctccaggtcggaggtgcgagtctgcgccagcatgaacgccttcagcggtacctcggccttttgcagggcttcctgggcgggaatctgctcgttcaggtagggctgcagggcctggctgttgatcttgtcgaacaccggggccatgacgaacatggtcaggaacagcgccagccccaccagcacctggttcgacggcgtcgattgcaggcccagcgcctggcgcaggatggagaagacgatgatgatccgggtgaagctggtcatcagcatgacgaacgccgggatgaagctcagcgcggtcatgatcagcaggatctgcaggctgaccgaatactcctgctggccctggccgttggtggtcacggtgatcgccgagatcgatgtcgggtcggcggccagcgccggccacggcgccagcagcagaaggcagagcgcggcgagcgcgccggccagggagatgcgcggagtcatggcttgcccttggggtccttgttcagcagctccagcaggcgctgggcgaattccggcgtggccggctcgccgtccggcaggtgtaccggctccttgagcacgtgcaacggcgtgatccggccgggcgtcaggccgagcaggatctgctcctcaccgacctgcaccagcaccagccggtcgcgcggacccagcggctggctggcaagggtgcggatcaagcggttgccgcgcggaccggcctgttgcacccggcgcaccagccaggcgagcaggaagatcaggccgatcaccaggcccaggccgagcaccagttgggccagttgcgcggcggcgccggaagcggcgcccaccgtcggcgcggcggcacccgtcgtcccctcggcggcgcacagcggcgcgctcagcgaggcgagtgccggcaggaagccggcgaacaggtagcgacgcatgtcagcgcagcttcttgatgcgttcgctgggactgatcacgtcggtcaggcggatgccgaacttctcgttcactaccaccacctcgccgtgggcgatcagggtgccgttgaccagtacgtccagcggctcgccggccaggcgatcgagctcgatcaccgacccctggttgagctgcagcaggttgcggatgctgatgtcggtatgcccgacctccatggaaatggtcaccgggatgtccaggatcacatccaggttgggcccctccaggccggaaatggtcggtgccttcggcgaagcgccgaactcttccatcggcgcccgcggggtactcgactccgccacgggagtcgcgccgccctgggccatcagcgcatcgatgtcgtcctggctggcgtcgcccgcctcggccagcgccgccgcccactcgtcggccagtgcctgttcctcggtggtcactttttcttcgtctgccatggttcgtctttcctccgggggaagcggtcagcgcgagcgctcgaccgcttcgagaatctgtagcgccaggttgcccttgtgggcgcccagcttgaccttgaaggcgggcacgccgttggcgcgcatcaccatgtgttccggcatctccaccgggatcacgtcgcccggctgcatgtgcaggatgtcgcgcagcttgagctggcggcggaccacggtggcgccgagcggtacctggacgtccagcacgtcctcgcgcagggccttgatccagcgctcgtcctggtcgtcgtggtcggactggaaaccggcgtcgagcatctcgcggatcggctcgatcatcgaatagggcatggtgatgtgcaggtcgccgccaccgccgtccagttcgatgtggaaggtggagaccaccaccacctcgctgggactgacgatgttggccatggccgggttgacctccgagttgacgtactcgaagttcatctccagcaccgcctgccaggcttccttcagatcgacgaaggcctgctccagcaccatccgcaccacccgcagttcggtcggggtgaactcgcggccctcgatcttggcgtggcggccgtcgccgccgaagaagttgtccaccagcttgaacaccagcttggcgtcgaggatgaacagcgcggtgccgcgcagcggcttcatcttcaccaggttgaggctggtgggaacgtacagcgagtgcacgtactcgccgaacttcatcacctgcacgccgccgaccgcgacgtcggccgaacggcgcagcaggttgaacatgctgatgcgggtgtagcgggcgaaacgctcgttgatcatctccagggtcggcatgcggccccggacgatgcggtcctggctggtcaggtcataggacttgaccgatcccggcgtcgcctcgacttcggtttccaccaggccatcgtcgacgccgtgcaacagcgcgtcgatttcatcctgggaaagcagatcttgcacggccatgggatacctactgcagcacgaaattggtgaacaacacttgttcgatagccagttggccggtttccttcttggccagttcctgcaatccggcggtcgcctgctggcggagcatttccttgcccaccggagtcaccagcgagtcgaaactctgactcgagaacagcatcaccagtttattgcgaaccagcggcatgtgctcgcgcaatgcgtccatctgcgccttgtcgcgccccatcaacgcgacgccgacctgcatgtagcgctgccggccgttctggttgaagttgacgacgaaggccggcgccaggatctcgtagagcgccggctgcttgcccggcttcgccgcctcgctggcgacttcctcggtcttctcggccttcagcgacttgctgaggaagaaccaggtgccgcccaccgacaggccgatcgccagcagcaggccgaccacgatcagcaggatcagcttcagcttgctcttgccgccgctcggagcccccgcgtcggcgggtgtcgcctctttcttagccatgccaaaaatccgtcgctatagcgtcaaatgaagggtttcacaggggcagagcaagggttgtgccatttctgcaacgccgccccgcctcctgggaccagccccagagggctgtccgagatgatagacggcgcggatattacagcctggccacaggaaatcatccccgtcttttgcgaaattgcccgctccggaaaaagaaaggcctcccgcaggaggcccaaaggggaaatgcagtcgttcgcctcaggcgtagtagtcgaccagaccgcgcgccgccgacgcacccggccggctgcggatctcgctgactccggcgagggtttcctcatcgcccgaggcctcgccggccaagccgcgtccgcgcgccgatccgccctcgccctgctgctggccctgccagccccgcgccagcgactggtcggagacgttcacgtcgagctggttcatgccctgctggctgaacatgtcgcgcagccggtgcatctggctttccagggcgtcgcgaacgccggcgttgggactggcgaaggtcacctgggtctggtcggcggtcatgtggatgcgcacgtccaggcgtcccagctcggcggggtcgagctggatctccgccgacttcaggttctggctggacatccacatcacccggtccaccaccgcctcgctccagccgttctgctgcatcgccaccggctggccgggcaccgtgccgttcaccggacggttggtcagggcctgttgcgccatggcctgggtcagcccgttgagcttggccgcgaaaggttcaccgcggggttccgccttgctctccagcaggctctcggaggcggcgctggcgacggccggctcggcggtctgctgcaactgggcctcgagcgccttgccgtcgacggccttggtcaaggaatccgaggtcaggccggcaagggcatcgccgaggttcgcctggcggggatcggcgctcttcgccggcccgcctttcgccgcctgcgcggcgtcctgggcaccctgctccagggccatgttcactgccggaacgccgttgagcttgaccagggtcgggtcgctgctggcttcggtcaggctggccggagcactgctggccgtcggcacggccggcggcagcaaagtcgcctgggtattctcgtcgagcatcggcacggcgccgccgaggccgagcagttgcagcggatcgaccggcgtttcgactttatcttcgccgtcggccttggcctggccgtcggccggcaaaggcttgccgtcttcggcaacggccggttgcctggcggcatccgtcggctgcgcttcgacggcgtccttgccggcgtcccgtggcttgtcccgcgaacccttggagggaccgtcggtgcgctcggcgggcttcttcgcggtctccttggcatacatgtcggagaagctggaagtcttgtcgttactgggctcaggcgttttctgctggctcttcggcgcagcggccttgggctttacatcaggcgtcggcggcaacaacacaccaggggcgacggccatgggaattctccatttgcgaagggattgcatcgtggcttgcgcaagggatggagcaaggtccgggccaacttcgccgagagcgtccgtgaaacgctcgccagggcgccgcagcaggcacgctcgctttgcccgcaggtcccgtctggactacaatccagagccgcatccctcccgaggtagtaccctgatgtccttcgccgaaaaactgtcccgtctgcaagccttcctcgatgccgatgacctgcacgaagaagcgctggactacgtggcgacccacggctacctgaccgccctctccatctgcccggagcaggtgccggagcgggagtggatcgacgccctgttcgccgaaccgccgcactaccgcagcgatgaggagcgccaggagatcgagacttccctcgagcagctcaaggcgcacatcacccgcgtgctggccagcgacgaagacctcgagctgccctgcgacctcgacctcggcgacgagccggacgactccgacctgcgcggctggtgcatcggcttcatggaaggcgtgttccttcgcgaggaagtctggttcgagcaggccgaggaggaagtcagcgagctgctgctgcctatcatggtcggctccggcctgttcgacgagcagcccgagttcgacgagatcgcccgcgaccgccacctggtggacgacatggtcgcgcagattcccgacctgctgaccaacctgttcctgctctgtcaggcgccggaagaaaagcccgccctgctcaagccgcgcacgcactaaggagcgccgcggtggcgcagcgggaaattcgcccgagcgctcgcgcctgggtgcgctatagcctccaggccgtgggtttcctaagcgtagccctgggcgtgatcggcatcttcctgccggtgctgccgaccacgcctttcctgctcctcgcggcggcctgcttcatgcgcagctcgccgcgcttctaccactggctggttggccatccacggctcggcccgtggatccgcgactatctcgacggcgaaggcatcccgctcaagggcaaggtctacgccatcggcctgatgtgggccagcatcgccctttcctgctacctggtccgacgcccctgggcccagggcttcatgctgaccagcgcggtactggtcagcatctatatcctccgccagaagacccgcccgccgcacgacgcctgaaggcccgctcaggacagcgccggatcgccctcgcccagcggcaagcggtcgccgggcccgcgccgctcggggctcagcacggtgaagccgaaggtgttccagccgtccgcgctgtcgacgaacaccgaaccgccgtgcatgctcgccaccgccttgacgatggacaggccgaggccgtggttggcctcgctgttgctgcgcgccgcgtcgacccgatagaagcgttcgaacaggtgcctgcggtgctcgtcggcgatcggcacgccggggttgctcaccgccacccgcacttcgtcgccgcgccgctcgacgccgacccgcagcgtgccgccggcggcggtgtgctgggcggcgttgtacagcaggttcgtcaccgcccgctggaacagggcgcgctcgaccagcgcgcgagcctcgccacgcacctcgatgccgaccccggcctcgtcgaagatcacctcgaggaaatccaccgtggtggcgatctcgccggccagcgaggtttcctcgcgctcgcaggccaggcgtccctggtcggcgcgggcgaggaacagcatgtcgttgacgatcgcccgcagccgctccagctcctccaggttggattgcaggacctcttcgtaatgttcgccgctgcgttcgcgggacaacgccacctgggtctggccgatcaggttggtcaatggcgtgcgcagctcgtgggcgacgtcggcattgaacgactccaggcgcacgtaggcctgctccaggcggtccagggcgccgttgaacgctcccaccagctcgcgcagctcggccggcagcggcgagagctgcaagcgctgcgacaactgccgcgggctgatccgccgggcctcctcggacagccgatgcaccggccacaggcccaggcgggcgatccagtggccaagcaacgaggccagcagcacaccgagggcggacaggccgagcagccatttcagggtggaggtccgcgcctcatggaacgccgcgctgtcgatggcggtgacgtaggtcagccgcggccgcccctcgcgcgccggcaacacgccgacccgcgcagtcagcgcgtaccggtgctccggcaactccagttcgtagcggccggcgccatcggcgatcagccgctgcaccggttcgctgaagcgcccgtagtgatagcgcgggtcgtcgctgtcgatccagaaacggatcagctcgtactcctggctcaggttgtccagcttgccctgcaggtgcggccagcgctcggccaggtcgggatggtcgagcatccgcgagaccatgttgaagcgcacgtccacctcgccctgctgcaggcgctcggtctggcggtcgaggatgcaatagagcatggtgccgatgagggcgaagatcaccaccgcggcgccggcgaacattcccgccaggcgggtcgacaaggacatgcccacctcagcccgactccgccagcgcacggttctccaggacgtagcccatgccccggatggtatgcagcagcttattctcgaacggaccgtcgagcttggcgcgcaggcgcttgatcgccacctccacgacattggtgtcggtatcgaagttgatgtcccagaccagttcggcgatcgccgtcttcgacaggatctcgccgctgcgctgggccagcacgcagagcagcgcgtactccttggcagtcagctccagacgggtgttgccacggaagaccttgcggctgagcaggtcgatggacaggtcggcgatgcgcatctgcgaatggctttcatggttgccgccgcgccgggtcagggcctgcaggcgggcgaccagttcgaggaaggagaacggcttgatcaggtagtcgtcggcgccctcgcgcagcccgcgcacccggtcttccacgcgctcgcgcgcggtgagcatgatcaccggggtctgccgccgctcgcgcaacgcccgcagaacgccgtagccgtcgacgcccggcagcatcacgtcgagcacgatcacgtcgtactcgccatggagcgccaggtggcgaccgtcgatgccgttgtccgccaggtccacggtgaacccctgttcgctgaggccacggttcaggtagtccgccgtcttcgcctcgtcctcgacaatcagtacccgcatctatcgcccgatcctctgttcgccttcgcatcccgggcgggacgcatgcctgcctgcatcctagccacgcgccgccgtccaggaaagccgcgtccgttacgcctcatgtcgccgtcgccccagcggttccgccgtccgaggtcgtcgtcccgcgccggtggaacagccgctccagggccaggtataccaccggcgtgctgaacagggtcagcacctggctcaccagcagcccgccgaccaccgcgatgcccagaggctggcgcagctcggaaccggtgccgaagccgatcatcaggggtatcgcgcccagcagcgcggccagggtggtcatcatgatcggccggaaacgggtcaggcaggcctggtagatcgcctgctccgcgctcatgccctgctcgcgctgggcgacgatggcgaagtcgaccatgaggatgccgttcttcttgacgatgccgatcagcagcacgatgccgatcagcgccatgatcgagaagtcctggccccaggcccagagcaggaacaccgcgccgatccccgccgagggcagggtcgagaggatcgtcagcggatgtacgaaactctcgtagagcacgccgaggatgatgtacaccgcgatcagcgcggcgaggatcagcagcggttgcgaggccagcgagctctggaaggcctgcgccgcgccctggaacacgccgataatggtcgagggcatgccgatctcctcctgggcgcgctgcaccgcctgcaccgcctcgccgagggacaccccggcagccaggttgaaggacaggttgaccgccgggaacatgccgttgtggttgatctgcagcggcccggagcgcggcgccgcgaccttggcgatggccgacagcgggaccatctcgccgctcagcggcgagcgcaggtagaaccagtccaggctttccgcgcggccgcgctggcgcgcatcgagttcgaggaccaccttgtactggttgacctcggtctggtactcgccgacctggcgctggccgaaggcgtcgtagagggtctggctgacatcctcggcgctgaggccgaaacgcgccgcggccacccggtcgatgtccagcgcggtgacgctggcgccgacctgcaggtcgttggacacatccatcagccccggcacctgcttcaggcgctcggtgaggcgttgcgcccagagcgccagctgggtgctgtcgctgctgcgcagggcgtactggtactgggtccgcgagggtccggaactgaggttgatgtcctgcgccgcgcgcaggtagagcatgattcccggcaccttcgccagttgcgggcgcagccggtcgatgaactcgccgaccgagacatcgcgctcgccacggtccttgaggacgatccagaaacgtccgttggccaggctctggctaccgccggtgacgcccaccgcatggttgtagctctgcaccgccgggtcgctggcgatgatctcggccagttgccggtgcttggcgaccatgtcgtcgtaggagatatcctcggcagcctggctcgtgccgaagacgaaggcggtgtcctgcaaggggaagaaacccttgggaatcccgacgtagccggccaccgccaccagcacggtaaaggcgaagccgaccagcatcagccgctggtgcccgagcgcccagcgcaggccgcgctcgtatccgccggtcagccattcggcgaagccctttctcggcgcgtcggcatgccgcaatgccggcatgaagcgcgaagccagcatcggcgccagggtcagcgaagcgagcaccgagatcaggatcgccaccgtcacgctgaccgcgaattcgcggaacagccggccgacgatcccgcccatgaacagcaggggaatgaacgcggcgatcagcgagaagctgatggaaatcacggtaaagccgatctccgccgcgcccttgagcgccgcctcgaccttcgaggcgcccgcttccaggtgtcggtggatgttctccacgaccacgatggcgtcgtcgacgatgaagccgacggcgatgatcagcgccaccagggtcaggttgttgagggtgaagccgagcacgtacatcgccgcgaagctggcgctcagggacaccgccagcaccgtggcgacgatcagggtcgccgacagctggcggaggaacaggcccatcaccagcaccaccaggccaatggtcagcagcagggtcagttcgacctcgtgcagcgacgagcggatggtccgggtgcgatcgttgagcacgtctacctcgatggtcgccgggagcatctcgcgcaggcgcggcaatgcggcctggatcgcgtcggcggtatcgacgatgttcgccccaggctggcggaggatcaccagtgccaccccgggcacaccgttcggccaggcctgcacgtagtcgtcctcgggcgccgagacgatccgcgccacgtccttgaggaacaccggcgcgccctggcggtaggcgaccaccaggtcgtcatagtcgctggcgttgaacaactggtcgttggccgcgagggtcgacacccgcccctcgccgtagagcgcgcccttggccaggttgacgctggccgactgcaacgactggcgcaggtcggccagggtcagctggtaggcggcgagcttttccggctgggcctggatgcggatcgccgggcgctgctggccgaccacgaagatctgccccacgccgttcacctggctgagctggcgggcgaggatggtctcggcgtaatcgctgagttcgatcagcggcatcatctccgagttgacccgcaggatcatgatcgggctgtccgccgggttgaccttgcgccaggtcggcaggttcggcatgtccaccggcagccgcccggccgcggcgttgatcgccgcctggacctcctgggcggcgacgtcgatgctcttgtcgaggctgaactgcagggtcagggtggtggtgcccagggcgctgctggaagtcatctcggtgatcccgggaatcgcgctgaactgcacttccaagggggtggccaccgacgaggccatggtttccgggctaccgccgggcagcaaggcgttgatctggatggtcgggaagtccgcctccggcaacggcgccacaccgagccggaggaacgccagcagccccagcagcagcgaggccagggtcagcagcgcggtggcgatcgggtgccgtacgcaccagccggaaatcccggcgcgcggcgtcacggctgccgctccgccgcctgagccaggctcgggcgcggctcctggatatcgaccagggcgccgggcatcagccgcgagtggccgtccaccaccacctggtcaccgctggccaggccttccaccacactgaggccgtcgatgtcctggagcacccgcactggcaccgcctcgacccggtcggcggcgacccggtagacgaaattaccctccaggccgcggcgcaccgccttgctcgacagcaccaactggtcgcgccggaccccggtgtgcaggctcaccgcgacgaactgcccgggccagagccgggcctggcggttatcgaaggaggcgcgcacgcggatggtaccggtggaactgtcgatctggttgtcgatggtcagcaaccggccctcgcccagcgcgctcccgccgtcgcggctgtaggcgcgcaccgccgcctcgccgccgagcagcgcctgcaactggggcaactgttcctgttgcagggagaagactacggagatcggtgcgatctgggtcacgctgaacaggccgagactgtcgccgacccgcaccaggttgccgacatcgacgttgcggataccgaccttgccggataccggcgaggtgatccgggtgtaggacaggcgcacccgctcggcgttgatggtggcatcgttggccttcagggtcgcgcgcaactggtcgaccgtcgcctgctgctggtccagcagttggcgtgacaccgcacgctcggcatacaggctgcggtagcgttgcaggtcctgctcggcggatttcagctgggcctggttgctcgccctggaggcctgcgcctgctccagcgcggcgacgacggcgcggtcatcgatggtcgccagcaactcgcccgcctcgaccatctgcccttcgctcaccagcaggcgggtcaactggccgtcgatctgggtgcggatcaccacgttgtgcaacgaagtcaccgtgccgatgccgctgacctgttgctcgacgtcgcgccgctccacccgcgccacgttcaccgggaccctggccggcgcgggcgccgccttcgccccggcgtcgccgccgagccatgcccaaccgccgaaggcgaccaggcccgccgccagcatgcccaccaggacccgtcccccaccactgcgcaacgcctgcatctgtccacctttcccagtggccggcctcgcgcggccgacttcgttcttctttataagcagcgcagcgggaccccaccctgacccctgaatgacaatcctgtcagtttcgccggacaccccgcgctggcaggccgcccggcgctctcgtagacttcgctgagtccttccggagcccgctcgatgtccccaacccccggcgcccgccggccctgccccagggcctacgccccctggctgctgtcgctggcggcgacattgctgctggcagtcggcgcggcgctggcgcagtgggacctggagtcgatactgagccgtgccgagcagcgctacggcgagctgggcgcggcgaaatcacgcctgggcgactggggccgcctgctcgaacagggcggcacgctcgacgaagcggccaagctgcgcgcggtcaacgacttcttcaaccggtcgctgcgtttcaccgacgacatcgagatctggcaacaggaagactattgggcgactccggtcgaggcgctggtcaagggcgccgccgactgcgaggactacgccatcgccaagtacgtgaccctgcgtcgcctcggcgtcgccagcgacaagctgcgcatcacctacgtcaaggccctgcgcctgaaccaggcgcacatggtgctgacctggtacgccagcccgggcgccgacccactggtgctggacaacctgatcggcgagatccgccccgcttcgcaacgtgacgacctgttgccggtgtacgccttcaatgccgagggcctctggctgcccggcgccgacggcggacgccggaccggcgacagcaagaagctgtcgcgctggcaggacctgctgaccaagatgcgcgccgaaggcctcgacctcgacgcacccaaggaggattgaatgtcactgctcaagcaattgttcctcgccatctgcctgttcctcgtcgtcgccttcagcggcagcttcgtcagcagcgtggagaactcccgcgagcagttgcgcggccagttgcgctcccacgcccaggacgccgccaccgccctcggcctgtccctgacgccacacgtggacgacccggcgatggtgcaactgatggtcagctcgatcttcgacagcggctacttcgccagcatccgggtgatcgacatcaagagcggcaagccgctggtcgagcgcgtgcaggcgcatgccgagcgtacggtgcccggctggttcgaacgcctggtggatctccagccccagggtggcgacgcgctgatcatgcgcggctgggaacaggcggcgcgggtcgaggtggtcagccatccgcaattcgccctggcgcgcctgtgggacagcgccctgggcagcctctactggttgctggcctgcggcgcggcgagcctgctgcttggcggctggctgctgcgccgccaactgcgcccgctcgaccagatggtgcgccaggcccatgccatcagccggcgggaattcctcagcctgcccaggctgccgcgcacgccggagctgcgccgcgtggtgcaggcgatgaaccagatggtggagaaacttcgcacgctgttcgccgaggaggccgcgcgtagcgacaagctacgcgcccaggcctaccaggacagtctcaccggcctgcccaaccggcgcctgttcgacgcccgcctcaacgaacagctgggtgccggcgagcacgagcatgccgggcagctcctgctgctgcgcctgaacgacctgaacgggctgaaccagcgtctcggcgggcaacgcacggatgaattgatccaggcggtcgcccgcttgctggtcgactcctgcggccagcaagggcgcgccgactggctgctggcccgcagccgcggcggcgagttcgccgtgctggctcccggttgctcccgcgagcaggccgaacgcctggccgaggaactctgcgaaggcctggagaaccttgcccgcaccggtgccagcgatctcacgccggtcgcctatctcggtatcagcgcgttcgccgaaggcgactcgcccgcggatctcctggcccgtgccgaccaggccctggcccaggccgaaagccagcccgcccagccctgggcgagccaggacggcaccgcgctcgcggcgctcaacgatagccaggactggcacgactggatcgaccaggccctgacggagcgccgcctgctgctctatttccagccggtggtggactgcctggacacccagcgcgtcctccaccacaaggtcctcgcgcgtctgctcgacccgcaggccacggccatcgccgccgggcgcttcctgccctggatagaacgtttcggctgggccgcgcgcctggacctggcgatgctcgaacagagcctggagcacctgcggcgccatccacggccgctggcgctgagcctgtcggccgccagtgtccgcaatgcgcaggcgttcgccccgctactggccctgctcaaggcgcatccgcaggaggcgcgccagctgaccctggaactggacgagcggcacctgccagccgcggccgaactggaacgcctcagccaggtcctgcgcgaactgggctgcggtctcggcctgcagcatttcggcggccgcttcagcctgatcggcaaccttacccatctggggctggcctacctcaagctggacggctgctacctgcacgccgtcgaccgggaaggcgacaagcggttgttcatcgaagcggtctatcgcaccacccacagcatcgatctaccgttgatcgcggaacaggtggaaaccctcggtgaactcgaagtactgcgggaaatgggtttgcgtggcgccatgggacgcctgttcggcagcccggcgccctggtccggggatgcctgatagcgagtccggagcgggtcggactcgctttacagcggattcggcatcgacgccaggcgctccctctccgacagagaacgcgccggcgcgagccgacaggtccccgtcatgaaaccgccagtcgctgttccaccagcactcccccgtaaagcgcgatctgggtcttggcattgagttcgatgcgcaaggccaccgcgcgctcgatgccgatcttcaggtgcggaccgaagcgcgatacgtccaggccggcacggatcatcatcttctccacgcctacggtggttaccgtcaccagcgtctggatgtcgttctgcaggctgtagcgggccagcgcgcgcatcgcctccagcgtacagtcggaaaagcccagcgagcctttctgtccagagttgatggcgaaacggctgagttcccagatgtgcggcgagcaaggcgcttccttgccgtgcagaagctccgggaaggtgttcttcagcatgtaggggccagtggtatcgagaattcgccagcaaccgaaaacctgggcttcaggagtatcttcctggatcaacatgtaataaggactgagtgcgtcataaccatcgatttccatctcgtcgatgacactaacgtcccagcctttgcgctccttgaacacttgagcacgcaacttgtgcatctcgcccagcagttttttatcgaactcttcgcgccgaccaatttgtacgatcatcttcacttcctccaaataggaagctgaagaatttatgcaaatttcataattttataactagcaaatgagatagatttcggtgaacccggacccttgctaggctcgaagaaacgtccgaaaagatcagagcaatggcttcacacgagagaacacagccccaaaacatggccttccgggcaaaggccacccgcaccgcccgacgggaaagccaggaaactttctggagccgcttcgggataagccaatcctgcggcagtcgtttcgagaatggcgagaacctgcccttccctatatatctgcttttgcatttctatatagaagggcaaattaccgatcgccagctcgccgacctgagaggcaagatcagagagtaataagacccaaattaacggccataatggccgctacgcggcgggaggtcacaccgaacttccgccgaatatttcccatatggaagttcacattggcttccgagcagttgcagataaccgatatctcccaactggtcttgccgatggcgcaccactgcaacacttccttctcccggctggtcagaaccaccggtttgctgaccggatgttcgaaggccagtccggcaccgctctgcagtgcgtagtccttgagcatccacagggtcggcaggaccgactccatgaaacggttggcctcggcccggttttccgcttccacgctgaggctcagcgcgccgagttcgccgcgagcaccatgcagcggcatggtcagcccatacaccaggccggcggccgaggcttcctcgaagaactcgtgctgctttcgcgtctggtagatggacggttcccagaaaatcggcagtacgctctgggtacagtgactgaccgtcgggtcgacccgcgcgtagccagcccggtcgtaatgctcgcgccaggcggccgggtagttgccgacgatgaaggcgttctcgtagtcctggctgtcttaggcaacaggccgaacaggatcttcgagaatccaaggtcgctcgccatcttctgcaggatggcgctccactccaattttccacttgagcgttccagctcaagaaaaccgtcaaccaaggccatagcgctacgttcttcttaaactattaaccaatcagccaaatatggattcggcacccgatatccggcacgttgtacggcagtccgagaatcccggcttcctgccgaggcgcatgcgcccgtgcccgacgacccctgaagatgtccagtcagcccactctatagagttggcgttgtgccggaaaggcacatttcagtcccacttaacaatagaccgcagcgtttgatgcacctagtacgatacccgtcctagagggtaagcaaacgtttaaatgtgatctagatcacattttatgcgaactgaatacccagtcacacctggtccccgggttcactgtcggcccatcgccacgcgtgcgaccgctctcggccgggcgatccgaggcgcagacgtctgtgcgcggcgcacgggcaaaggcacagcgccacggccaagggggcgacctcgcggcgtcaggcctgccgggcacggacccggcgacatagccacttttccagttcggcgacgcagaacaggccgagcccggccagcagcacccgcgcccactcgcccggggccaggccgaccgagccgaacagcgcctgcaacggcggcgcgtaggtatagagcagttgcagcaccacgcaggcggcgatcgccagcaagacctggcggttgccgaacaggccctcgcggctgagcaccgaatcgtagatatgccggctgttgagcaggtagaacatctcgcacaccaccacgctgttcaccgccatggtccgcgcgctctccagcccggtgccatgctccagctcccagaggaacaggcccagggcgcccgccatcatcagcagcgagaccagcagcacccgccagacgaagaacagcgacaacaggggctccgccggcggacgcggcggacgctgcatcaggccgcgctcggccggatcgaaggccagcgccaggcccagggtgctggaggtgaccatgttgatccagaggatctgcgccggcgtcatcggcagggtcaactggaacaggatcgcggcgatcacgatcagcgcctcgccaccgttggtcggcagcatgaagaggatgaatttcttcaggttgtcgtagaccgcccttccctcgcgcacggcattggcgatggtggcgaaattgtcgtcggcgaggaccacctcggccgcctccttggccgcctcggtgcccttgttgcccatcgctacgccgacgtcggcgcgcttcagcgccggcgcatcgttgaccccgtcgccggtcatcgccaccacctcgccgctggcctgcagggcctgcaccaggcgcagcttgtgctcagggctggcgcgggcgaacacatcgacgcccggcagcacttcgcgcaggcgctggtcgtcgagcaactcgatctccgcgccggtcagcgccggccggtcgatgccgatcccgagcatggcgccgatcgcccgcgcggtgtcgacgtggtcgccggtgatcatcttcaccgcgatacccgccgcctggcattcggcgaccgcggccacggcttcctcgcgcggagggtcgatgatgcccaccagggccagcagggtgaagccatgttccacgtcggcgaaatccagcgtgcgctgctccgccggcatcgcccgtcgggcgatggccagcaggcgcaggccgcgagcggcggtgtcggtggccaggcgccgccagtagtccgggtccagcggccgcaccgagtcgcccacccgttcagcctcgcacatgtcgaggatgcgctccggcgcgcccttcaggtagaccatcgcctggcctgcgtggtcgtggtgcagggtggccatgaagcgatgctcggactcgaacggaatcgcatcgctgcgtggccgttccgccgccagcgcctgcggatcgaggcccagcttgaggccgaggctgagcagcgcgccttcggtggggtcgccctccagttgccatgcctcgccctgctggtgcaggcgcgcctcgttgcacaacagcgccgcacgaccgatctcctgcagatcgtcgcgcccggtgggatcgaggccttcgccgttgtggctgaaaccacccagcggagcgtagcctgcgccgctgacctcgatcacctggtcggcggtgacgatacgctgcacggtcatctcgttgcgggtcagggtgccggtcttgtccgagcagatcaccgtcaccgaacccagcgtctccaccgccggcaggcggctgacgatggcgttgcgccgggccatgcgctgtacgccgagggcgaggatcaccgtcatgatcgccggcagcccctcgggaatcgccgaggcggtcagcgccaccactagcatgaacatgtccaccaccggctggccctgccagagggtgccgaggacgaaggtggcgccggccagcagcaggatcgccagggccagccagcgactgaagctggcgatctgtcgcagcagcggagtggccagggtgcggacttcgcgcaacagcgtaccgatccggcccagttcggtatccccggcggtggcgaccaccactccgcgcgcctggccgctggtcaccagggtgccggaataggccatgcaacggcggtcgccgagcagcgcgtcgatggccaccgcgacgcagcccttctccaccggcaccgactcaccggtcagggccgactcgtcgacatggaagttcttcgtttcgaacagccgcaggtcggccggcacccggtcgccggaggccagcagcaccacgtcgcccggtaccaggcgttcggcgtccagcgcctggcgctggccgtcgcgcaggaccagggcatgcagcgaaagcatgtcgcggatggcgtccagcgcgttggccgccttgccctcctggacgaaaccgatcagcgcgttgaccaccaccgccaggaggattaccgcactgtccacccagaagccgagcagcgcggtgaccagcgaggcgaacagcatcatgtacagcaggacgttgtggaactgccgcagcaagcgcagcagcggcccctggcgtttcggcgcgggcaatcggttgtagccgtgcgccgccaggcggcgggcggcttcgtccgcgtccaggccggcggcggagctgtgcaatcgttccagcacccgttgcggcgggctggcatgggcgtcgcgggaagacaggggtgggatgccgttcatgggattcctgcgcctcgttctgatgaacagaactatcgggcaggcctgcgccgcaacgtttgacctgtctcaaacggatgcttgcagttgaaagcatctggccggggaaaacttttccggatgttgcgcggcacctcgctccacagggcgaggtgccgcgtcctcctacaggctcatgtgcagcagcgggaacggccgccccgccgagtcggtcgcggagcggccggtctggcggaacccatagtgtcgatagaagccgcaggcctgcgggttctgctcgttgacatcgacgctcaggcgcggccaggtcgcccgcgcatgatcgagcaggcgtcggccgataccccggccgcgcagcccgggttcgacgaagagcatctcgacatgcgcctggttcaggccgatgaagccctgggccacgccgtcgtcgtcgaccagcacccagacctcgacggccggcaggtacaggtcgcggacctgtgggtaaagctcgacgatgtccgcttcactgagaaagtcgtgggtcgcgcggacggaacgttcccacaggtcgaccaatgccgtgttgtcggcgtcgacgcgcttgcgaatgtgcatgctggattcctttatccgaaagattccaggtagaacgaaaggcagccgcgaccgccaggccgggcgccacgctgaggttcgtcgcctggatgcccgtggcgcgaatcaacgcatggacggtgcacagcggcggcgacgagggaggaagggagcgccatcctagaagaaaacgaccggtcggaacagccgctcttcccatgcttttcccgaaacgacgaatgaacgacactgcgcccgactctttttcccggtatcgcccatgcccaactccccgcttccttccggccgcaggctgcccgcttgcgccttcgccgacatcggcgagccctacgccgtgttccaggctcccggcggcgcgctccttgcggtggccagcgcctttcatgggcaacacccgggccgacagctcgacgtctacgaacagagcctgcgcctgtaccgcggcggcgacctcgaatgcatcgccgtcctgccggacctgggctttccgctcaacgccatcgcctggcacccgagccggcccgtactggtgatcggcggcggacgctacgacggcggcgccttcttcgaaggcggtctgctggcctgggactacgcgagcggcaagatccaatcgctgctcgccgacaaccgcgaagtgctcgcctgcgacttcgaggacgacggccggcgcctggccttcaccgtcgcccccagcgacgacctggaggaccgaccgttgttccgccagcgccattcgctagcctttccggtcgacgccccactggtgctggacgacctgcccggcacccgcctgcccttcgactgggccctctaccctgcctcgacacaacgcgaagcagcgctgccgatcctggaaaacctagccctgggcaaagatcggcggttcctgcatcgtccaccggtgtgggacctgtgctttctcgacggacaacgcctggccatcgcccgcgccagcccccggctcgagctctggaatctggccgacgacagcttgcgcagcttcgaactggccgaacggggccagtgcctgcaggtcttccataacgccacggacgacagcctgctggtcaatctgcaactcgggtatgccacccagcgactgttcaaggtgccgctgacaccgggacaaccgctgctcctgagcgactgccgccatctgctggcgcaatccgcccaaggcggttttctcgcccgccagatcgccctcgagggcaaagacctggaagacctcgtgctcgacccggccggccggatcatccacaggcgccgtctcggacactacgacctgttcaaccatcatctgcgcatcgaccgtggcgaagccttcttctacctggccggcaatccgccggagcagcaccaggacaagggcctgttccgcctcgacccgcagaccttcaagacctgcgaagtgctacgcctggagcgccacccggagcacttcaacaacctgcacggctgcctgctgggcaatcgcctgctgctcaacgccaaggtctacaactcgccgcatcacgcctacggtacccagcgcctgacctgctacgacctggagagccgcggcacgctctggggcgcgaccctgtccgcccaggtcagcgccttcgcgccgttgcccggcggacaatggatcgcactggcgctggtcgatggtcaggtcgaggtacgcgacctcgccagcggcgaatgtcgctggcgctaccgcacggcagacgccataccgctgtgcctggcagtcagcgacaaactcctcgccatcggtttcagccacggcggagtcagcctcctgcaggtcgcggcggatggccagctcatcggtcctccaggcgccaacccgcggcagtagcccgcagttcgccgtccagcgccaggtggcggagaaacaccgggtcgtgggacaccaccagcaaggccccacggtactgcccgagcatgctttccagggcctgccgcgcagccaggtcgaggtggttgtccggttcgtcgagcagtagcagctgcgccggccggtcggcgtagagcaccagggccagggccgccttcaggcgttcgccgccgctcagcgtcgcgcacggctgggcgagccgttcagccggcaagccgagttgcgccaggcgcgtgcgcagccagctttcgccgcgactgcgattgacctccagcaactgctccagcacgcctcgcccgtggtccagcacgctcagccgctggtcgagataggcggcgcccaccgtcaccgcgcaggttcccgccagcggcgcccgttgcccggccagaagccgcagcagggtcgacttgccgctgccgttcgggccgaccagcgccagccgtcgcggaccgctcaggagcaggtcgatttcgcgcaacggcccgcgcagatgcggcaggaccgcgcccttcaactcgacgatccggcgctgtgccgccagttcggcatcgggcgaatcgagcagcagcggcgacgcctcctcgacctcccgggcagcctcgcgcacctcgcggtcgagacgctcgcgctccgcctggtgggcgttgcgcagcttgccggcgctgacctcgctacgttccctgaacccaccgagcaggatcttcgcctggttcgccgtcttgccttcgcgccggccgctggcctggcgccgctcctggcgctgctgctgttcgcgcatggccagggtctgccgcttgcgctccagacgacgctggtccaggcgacgttcggcggcctcgcgcgcctcctcccggctctgcgcgtagaaggaatagccgccgccatagctgcgcaggccgagggtcgacagctcgacgatccgctgcataccctccagcagttcgcggtcatggctgaccagcagcaggccgccgtcccatgccgccaggcgcgcccgcagcaaagcgcgtgccggcccgtcgagagggttgctcggttcgtcgaggatgagaaagtcggcgtcgtcgaggaatgcgccgagcagcgccacgcgcatgcattcgccgccgctcaggcgttcgctcggggtgtccgcgcggagatggccgagcccctcggcggccagggcgtcggccaggcgttggcggatgtcccagcgctcgcccaggcattcgtagtcggcggtgtcgaggctacccgcctcgatccgcgccagcgcctccagccatgggcggacgccggccagatcggcgacggtcgggtagtcggccggttcgagctgctgcgccaggtagcgcacgcgcccctggcgccggacgctgccgctggacggctgcaagtgtccggcgagcaggcgcgcgagcagcgacttgccgacgccgttgcgtcccaccagcccggtgtgccgggtgtcgaaggtttcgtcgagatcggaaaacagaaggctgccgtccggcagctggaaagagacgccatcgagcgtcagggtcgacgtattcgtcatggatacccccttgatgccatgcattcccccgggccctcgggccagggacggaaaaccggccgtgcagacacggcagcatcaattgcgcatcggacgaacacctcgtacggaaggaaagaccgcggcagtctactccgcccatgcggccctgccaatcgggcatacttttcgtttccgacagacacgaccgacatggccagaccgcgcatctccgaactcttcgaacaggaaccctcgcgctggggcggccgtggcgacccctacctctggcaggaaatggccgggcaactggcggacgcgtcctggccggcttccgcagcggccctggaacacctgctcggcgagaccttcgagcgcctcagcggccatccgctggaatacgatgccttgatctacctcgcgcgccacgcccacggcggcatgtccagcggcatggtcagcccggagttctggcgcgaaacggcaatcccggaactgctcgaccgctatcggcggcggcgctcctggctgagatggttgcgccgataggtgtcctcgcccatcgccgcgatctgcccctcgatcagggcatcgaagggtttcagcaaggcttcgtgggtacgcggcgcctccagttcgtcgagcgccgcagcgattgcttcgatggtcgacagcgcgccctctcccggcgccttgcgcaggcgataacgcgacgccatgccttcggccaggctcacccgcggcagggccgccagggccgggttcaggtgcaggagcttgcgcgccttgcgccaggtgccgtccggcaccaccagcaggaggggctcgccggcggcctcggcggccatctctgccagcgcacgcgcctgctcgccgggaaacagcaggcaggcccggtagcccggtacccgccaggtctcctcggcgaaacgctcgccaacccgcagctccgcattgcacaagccgaggacggccaatcctgcggtattcaacgcgtgcccgacctcgctggggtgctgcaggaccagcacccgcgtacgcgacggcaaggagggaatcagcgcgcagaggcaatggctggcggggcgagcgcaacgctcgcagcggatacgtggcatgggacgactcctggaaggggcccagtgtgccacaggcggaggggcttcctctcactcgcaaaaacgtcatatttccgacgaatggcggtaatttgtttcacccattaagaataacgacgaatttttgtcgttcgatgaaaaaatacaatcgtcccaccctctcaactcccgcccatcggcgccgaagacagggatgagcccctctctctatccaaggatttttctcatgttcactcgcaagtaccgacagatgaacgccgacttgcaacagcaactcgccgccgagcgcctgcacatggcggccctggaccgctccatggcgcgcgtggagttcgatccggacggcaatatcaccgatgccaatgagaatttcctgaccctgctgggctaccgccgcgacgagatcctcggcaaaccgcatcgccagctttgcgacggcgcctacgcgcaatcggaagactaccggcgcttctgggaacgcctgcggcgcggcgaacacttttccggccgctgcaagcgcattacccgcgagggccggccactctggctggaagccacctacaaccccgtacgcgacgggcagggtcgactgctgaaggtggtcaagtacgccagcgacatcgatgccatcgtccaccaggaacacgagatgcagagcaagctggatgccctgtcccgctcgatggcgatgatcgagttcgacctcgacggcaatgtcctcgcggccaacgacaacttcctcgccaccatgggctatggccgagccgagctggccagcgccaaccaccgtcagttctgcgaaccgggctaccgcgacggcccgcagtacgccgacctctggcgccgcctgaaccgcggcgagtacgtcaccgggcagttccgccgggtccaccgcaacggccagccggtctggctggaagccagctacaacccggtctacgacgccgacggcaagctctacaaggtggtcaagttcgccagcgatgtcagcgaccgcatgcgccgctaccaggccgaggcggacaacgcccaccaggcccataccctgtccaccgagacccgcacggtcgccgaacacggcgcgctgatcatccagagcgcggtggaggaaatgctcaagatcgcgaataccctggatgcttcctcgctgaacatcggcgaactgtcacagcactcgcaacagatcacctcgatcgtcaacaccatccgcgagatcgccgagcagaccaacctgctcgccctcaatgccgccatcgaggccgcccgcgccggcgaccagggtcgcggcttcgccgtggtggccgacgaggtgcggcaactggcggaacgcaccagcaagtcgaccaaggagatcgccgacatgatcggtcgcatccagaccggcacccgcagcgtcatcgacgacatgcagcacagccaggaacaggcgcggcgcggcgtggagctggccaacgaggccggcgcggcgatcctcggcatccgcgagagcacgcacaaggtggtagaagcggtgcagcagttctcgcgcaccctcaacgccgatctctagggctcaggccaggctcatctgcgtccgcaactggtcgcggaaggcctggatcagcggctcgcgcgagcggccgcgacggaggatcagggagaatggcgcctggtagccgaaggtcgccggcagcagggcgcgcaggcgcccctgctcgacccacgggtgagcgtagtgctccggcaggtaaccgatgtagccgccggaaaggatcaggatcagttgcgcctccatgctctccaccgttcccgcgctgtgcttgaatccgtgccgagccagctcggcctggctccagtagccgcggccgaccatgcgttgctgggtgatcagatcggcgggaattctccgcccgtcgaacagcggatgccggtcgctgcagtacagccagtgctgttcgcggtacagcggctggtagaccagtccgttcatgcgactggaaaaggcgccgatagccaggtcctggcggttctccagcacgctcagttgcagttcgtaggggctctgcaccagcaggtgcaggtgaaccgccgggtgttcgcggctgaaggcgccgatcacctcggccagcggcagcgccgggtcgctcaccgtggaatcgagcacgccgaggttcagggtgccgcgcagctcgcccttcaacgccagagcgtagcgttcgaagccttccagttcgccgaggatgcgcaaggtttcctggtggaacagctcgcccttgctggtcaggctgaagccaccgcggccacggtggcagagcacgatgccgagctggttctccagttggctcatgtaggtgctgatcgccgaggtcgacaggttcaactcctgctgggcggcggcgaagccctggtggcgcaccaccgcggcgaagatgcgcaacaggcgcaggtcgggcaaggcgttggacacggcgactccggtttgcgggcgaggatttcggacagcaggccgaggcaaaggccgccgtccgggctcggcggcgaagtctagccgcttcgccgttagtttagaaatctctgaactgattatttgtagccagcgatttgactcgctaccggctgtgaagagaatccgtccgacccctaaaacaaccacaacgaccgtgaggccaccccgtggacaagaatctccaccagcccctgggcggcaatgaaatgccccgcttcggcggcatcgccaccatgatgcgcctgccccatgtccagtcccccgccgaactcgacgccctcgatgccgccttcgtcggcgtgcccctcgacatcggcacctccctgcgctccggtacccgcttcggcccccgcgagatccgcgccgaatcggtgatgatccgtccctacaacatggccaccggcgccgcccccttcgactcgctgaacgtggcggacatcggcgacgtcgcgatcaacaccttcaacctgctggaagccgtgcgcatcatcgagcaggaatacgaccgcatcctcggtcacggcatcctcccgctgaccctcggcggcgaccacaccatcaccctgccgatcctccgcgcgatcaagaagaagcacggcaaggtcggcctggtccacgtcgacgcccacgccgacgtcaacgaccacatgttcggcgagaagatcgcccacggcaccaccttccgccgcgcggtggaagaagacctgctggattgcgaccgtgttgtgcagatcggcctgcgcgcccagggctacaccgccgaggacttcaactggagccgcaagcagggcttccgcgtggtgcaggccgaggagtgctggcacaagtcgctggagccgctgatggccgaggtccgcgagaaggtcggcggcggccccgtctacctgagcttcgacatcgacggcatcgacccggcctgggcgcccggcaccggcaccccggaaatcggcggcctgaccaccatccaggcgatggaaatcatccgcggctgccagggcctggacctgatcggctgcgacctggtcgaagtctcgccgccctacgacaccaccggcaacacttcgttgctgggcgccaacctgctctatgaaatgctctgcgtcctcccgggcgtggtgcgtcgctgagccgtagcgcgaccatgaccgacgaccgcgtcgaacaggtgctggaggccgcccgccgactggtggcggccttcgcccgcaacgatgccgaggcctatttcgccgccttcagcgaggacgccagcttcatcttccacaactggcctcagccgctgcgctcgcgcgcggcctaccgcgagttgtgggagcgctggcgacgcgaggacggcttcgaagtgctggcgtgcgaatccagcaatacctgcgtcagcctgcaaggcgacctggcgatcttcagccacgatgtcgccacccggctgcgcctccagggaacggaaagcctgaaccgggaacgggaaaccatcctgttccgcctagaacaacaagaaggccgttggctggcctgccatgagcacttgtcggcgatgccggagtacctgccatcgactagctagctctcccgggagaacgtcatggataacaacaataaccaacacgcaatcacacgcatcgaaaccttcggggtcgaacagattcccgaccacgaacgcaacgccacgccggtcgatctgttccgcatgatcttcggcggcgccaataccttcgccaccgccgtgctcggcagctttccggtgctcttcgggctgtccttccaggccgggctgtgggcgatcctgctgggcgtcacgctgggcgcgctgatcctcgccccgatgggcctgttcggcccgctcaacggaaccaacaacgcggtctcctccggcgcgcacttcggcgtgcacgggcgcatcgtcggctccttcctctcgctgctgaccgccatcgccttcttctcgctctcggtgtggagttccggcgatgccctggtcggcggcgcccggcgcctggtcggcctggaagagagcgaactgaacctgggcctggcctacggcctgttcgccgtgctggtgctgaccgtatgcatctacggcttccgcttcatgctgctggtcaacaggatcgccgtgtgggccgccagcctgctgttcctgctcggcctgttcgccttcgccggccccttcgacgccgcctacgccggcagcgtgcaactcggccagccgggcttctgggccgccttcatcggcgccaccctgctggccatgagcaacccgatctccttcggcgccttcctgggcgactgggcccgctacatcccgcgccagacctcgcaggcacggatcatgctggcggtgatcggcgcgcagctggcgaccctggttcccttcctgttcggcctcgccaccgcgaccatcgtcgccgtccgcgcgccggactacatcgctgccaacaactacgtcggcggcctgctggccatcgctcccggctggttcttcctgccggtatgcctgatcgcggtgatcggcggcatgtccaccggcaccacttcgctgtacggcaccgggctggacatgtccagcgtgttcccgcgcctgctctcgcgggtgcaggccacggtgctgatcggggtcgcctcgatcggcttcatcttcgtcggccgcttcgccttcaacctggtgcagagcgtctctaccttcgccgtgctgatcgtcacctgcaccaccccgtggatggtgatcatgctgatcggcctgctgacccgtcgcggcttctaccgcccggacgacctgcaggtgttcacccgcggccagcgcggcggcgcctactggttcgagcacggctggaactggcgcggaatgggcgcctggattcccagcgcggcagccggcctggccttcgtcaacctgccggggcaattcgtcggtccgctcggcgaactggccggcggcatcgacctcagcctgccggtcgccctcggcctggccgccctgctctacctggtactgctgcgcctgttcccggaaccgccttgcgtctatggcccgcgaggaccgcgctgggtgcgcgcgcacggcacgcggagggcaccggcgatagccaccgcctgaggtggggtacacacacggcgggacgccagcgtcccgcgcttccggcgcctcgccggatacaacaatgacaatgagaaacttgggagacctgatatggccctcgacatattcgtcgttctgatctacgccgcgggcatgatcgcgctgggctggtacggcatgcgccgcgccaagacccgcgacgactacctggtggccggccgcaacctcggccccggcttctacttgggaaccatggccgccaccgtcctcggcggcgcctccaccatcggcaccgtgcgcctgggctacgtccatggcatctccggcttctggctgtgcggcgcgatcggcctcggcatcgtcggcctcagcctgttcctggccaagccgctgctgaagctgaagatctacaccgtcacccaggtcctggagcgtcgctacaaccccgccgcgcgccacgccagcgccctgatcatgctggtctacgcactgatgatcggtgccacctcgaccatcgccatcggcaccgtcatgcaggtcctgttcggcctgccgttctgggtctcgatcctgatcggcggcggcgtcgtggtgctctactccaccatcggcggcatgtggtcgctgaccctgaccgacatcgtgcagttcctgatcatgaccgtcggcctggtgttcctgctgatgccgctgtcgatcaacgacgccggcggctgggacgccctggtagccaagctgccggccagctacttcgacttcaccgcgatcggctgggacaccatcgtcacctacttcctgatctacttcttcggcatcttcatcggccaggacatctggcagcgggtgttcaccgcccgcagcgagaccgtggccaaggtcgccggctccgccgccggtatctactgcgtgctctacggcatggccggggcgctgatcgggatggccgccaaggtcctgctgccggacctggagaacgtcaacaacgccttcgccagtgtggtcgagcacagcctgccgaacggcatccgcggcctggtcatcgccgccgccctggcggcgctgatgtccaccgccagcgccggcctgctggcggcgtccaccaccgtcacccaggacctgctgccgcgcctgcgccgcggccgcggccagtccgacaacggcgacgtgcacgagaaccgcatcgcgaccctgctgctgggcctggtagtgctcggcatcgccctggtggtcagcgacgtgatcagcgccctgaccgtggcctacaacctgctggtaggcggcatgctgatcccgctgatcggcgcgatctactggaagcgcgccaccaccgccggcgccatcaccagcatgaccctgggcttccttaccgtgctggtgttcatgatcaaggacggcctcgacgccaatacgccgatctactacagcctggcggtcggcctgctcagcttcgtcctggtcagcctgttctcgcggcgcccgacgggtgtcgccagcgccgcctgaaccaggcacaaccccgacaggcgagggactttccctcgccttttccattcccgagaacatgaaaaaggaacggccatgaccacctgcggcgaattcctcgtcaagcaactcgaagcctggggcgtcgagaccgtcttcggcatccccggcgtgcataccgtagagctctatcgcggcctgcccggcagccgtatccgccatgtcaccccgcgccacgagcagggcgccggcttcatggcggacggctacgcacgggtcaccggcaagcccggcgtgtgcttcatcatcaccggcccggggatgaccaacatcctcaccgccatggcccaggcctacgccgactcgattccgatgctggtgatctccagcgtcaacgaacgcgcgcgcctggcccacggcaacggctacctgcacgagctgccgaaccagcgcaacctggtaggcaacgtctgcgccttcagccataccctgatgagcgccgaggagctgccggcggtgctcgcccgcgccttcgccgtgttcgacagcgagcggccgcggccggtgcacatcgagctgccgctcgacgtcatcaccgctcccgccgaacacctggccctgcgcccacgcaccgtcgccagccgcccggcgccggccctcgcgcccttgcgcgaggccgcagcgcgcctgcgcaacgcgaagaagccactgctgctgctcggcggcggctgcgtcgaggccgccgccgaagcgcgtgccctggccgccgcgctggacgcgccgaccgccctgacgatcaacgccaagggcctgctaccggccgaccacccgctgctgctgggcagcaaccagtcctgcgtgccggtacgcgagctggccgccgaggccgacgtggtgctggccatcggcaccgagctgggcgaaaccgactacgacgtggtgttcgacggcggcttcgccctcgatggcgagttgatccgcatcgacatcgacccgcagcaactgatgcgcaactacacgccgagcctggccatccacagcgacgcccggctggccatgcgcgtgctgctggccgaactgccgggcggcgaggcctcgccggacagccccggggcccggcgcgccgccgccgtgcgccagcgcctggccgaagacttcgccggctggtcgcactatcgccagctgttcgccgcgatcctagccgagtggccggacgcccgcttcgtcggcgactcgacccagaccgtctacagcggcaaccacctggtcgatctcgacgagccgcgccgctggttcaacgcctccaccggctacggcaccctcggctatggcctgcccgccgccatcggcgccaagctcggtgagccgggacgcccggtggtcagcctgatgggcgatggcggcctgcagttcaccctgccggaactggccagcgcggtggaagccaaggtcggcatcgtcgtgctgctgtggaacaaccacggctatggcgagatcaagcgctacatggagcggcgcgagatcactccgctcggggtcgatatctacaccccggacttcctcgccatcgcccgcggcttcggctgcgccgccgaacgcgcgcgcgatctcgaacacctgcgcgaactgctgcgcggcgccccggcggaccgtccgctgatcgtcgaggtgctgcaagccgcgcccttccatccctgacccggagcccgccatggacgattccgaactctaccgctccctctgcgagatcctcggcgcccgtggcgtgcgcgacagtgccgcgctcgccgggcaggaccccggctaccatccgcagaacctcgccggaagcttcctggtcctgccggaaagcaccgaccaggtcgccgccgtggtgcgtctgtgccgccaggcgggacgcgccctggtaccccagggcggactcaccggcctggtcggcggcggcgccgcacaagccggcgacgtgctgctctcgctgcgcaggctgaaccgcatacaccggctggatgcggccagccagaccctcgacctcgacgccggcgtcaccctcgaacaggcccaggcgctggccgccgaggccggactcgaccccggcatcgatctcgccgcgcgcggcagcgccagcgtcggcgggctggtcgcgaccaacgccggcggcatccgcgccttccgcttcggcaccatgcgccagcgcgtgctcggcctggaagcggtactcgccgacggcagcgtctacagcgacctgcgcgggctgctgaagaacaccaccggctacgacctcaagcagttgttcatcggcgccgaaggcaccctcggcatcgtcacccgtgcggtactgcgcctggagccgttgcagcgtcccggcgccaccgccctgctaggcctgcccgacgtcgacgcggcgatcaccatcgccgcgcgcctgcgccgcgagcacgccgaacgcctgttcgcctgcgagatcctctggcacgactacctgcaatgcaccgccgcccccatgggcgacagcgcgccgagcctggcgccctgccctctctacctgctggtggaactggccgaggaccgccacctggatgccggcgaggcgctcaccgccctgctggaagactgcttcgaggacgggctggtggaagacgccctgctcgccgccaacgaaacccagcgcctggccatctggcgcctgcgcgaagactccgacgcggccatccacgccggcgtcgacagcctgtccttcgacgtatcgctgccggtgccggccctggccggctacgtcgagcgcatccggcggcgcctggacgacctggtgaagggcatgcaggtcttcctcttcggccatttcctcgacggcaacctgcacgtcatgctcgccgccgacgtcccgctgctgccgctgcaccaggcggtggaggaaatcctctacggcgagttgggcgaatgcgctggcgtgatctccgccgagcacggcatcggcctggagaagaaggaagccctgggacgctacgccgatccgctgaagctcgcgctgatggcgcagatcaaggaactgctcgaccccagcgggctgttcaacccgggcaaggtcataccctgaacgcctatccttctgggatagcctttccaccgacagagaccgcgatgagaatcgtcagccgcgaccgctggttcgaaacccggcacttctacaacggtatcagcctgatccacgagccctacgtgcgccccttctatcgctgcaacatgtggcatgtccagggccgcgagcgcgacgtgctggtggacagcggctccggtctggtcagcctgcgcgagcaactgccctggctcaccgaacgaccgctgctggcggtggccagccacacccacttcgaccatatcgccggccaccacgaattcgccgagcgcctggcgcatccggccgaggcggagatcctcgccgcgccggacggcgacaacaccctggcgcgcgcctatgtcggcgacgagatgttcgaggcgcatccggagtgcccgctgtgctacgccgaataccgggtgcgagcagcgccggcgacccgactgatcgacgaaggcgacgtgctcgatctcggcgaccgcgtgctgcaagtgctgcacacgcccgggcactcgccgggcggcatcagcctgtgggaagcggcaacacagacgctgttttccggcgacatcgtctacgacggtccgctggtcgaggacgcctatcattccaacctcgacgactatgccgccagcctcgcgcgcctgcgcgagctaccggtgcgcaccgtgcatggcgggcatttcgcgagcttttccggggagcgtttgagggaaatgatcgtcgcctggttcaggaaccacgatcgatagaccaaaaccgggactctggccagcgccgcaggcggaggccagagcgtcggggaaccggctcagcgacgttgccgcgcggcgaggcgccggcgttgctcgtcgttttccaccgggatgggttgcatgcgcgggggctcgatcaggccaagggcgacaccgagttgccacgccaggttttgcagccagagtttcatgacaggccccttgtccaagggaaggagaatcgggcgacctgacaagtcaggtcgccctaggaaagagtagaccggcgtcccactctccgcacgttccactccgtccttggaaacaactttactgcgggaaaccggccccggaccctgacctgaatcaagccaacgccgattcccgcccttgcaggagaccgatccaggccttcaggttggcgccgaccatgcccttgcgccagaccagccaggtattcgcccgggcgaacggttcggccagcgcatgcaccgccaccgactcccgccccggcaggctttgcagcatcgacaccggcatcagcgccaccccgccgccggccaccacgcaggccagcatgctgtggtaggactcgatctccatcacccggcccatgctcacccgcgcgctggcgaaccaggactccagcagcaggcgataggagcagcgcgggcggaaggcgatcaccgcgctgccggccacgtcctcgggaccgcgcaccggcgggtggccattctcggtgaccagcaccatgcgctcctcgaacatcggctggccctccagaccgtcgaagtccagcgggccgtccaccagcacggcatccaggcgcccgcccagcagcgactcgaccagctcgccgctgggcgcggtctgcaattgcaggttcaccgccggatagcgccggtggtattccgccaggcgcggcggcaggtggatcgccgcggtgctgtacatcgagccgagggcgaagtcgcccaccggttcgcccccctgcaccgccgcgcgcgcctcctcctgcagggcgaacagccgcgcggcgtagtccagcaggaccttgccggccggcgacagttgcaggcgctggcgttcgcggaggaacaggtcgacgccaagctgttcctccagttgccgcaggcgcgtcgacaggttcgacggcacccggtgcaggcgctcggcggcgcgggcgatggagccttcctcggcgaccgcctggaagatcctcaactggccgaactccacggttaattctccaaaacagaacaagtaattcacgattattcatttttacagaattgccgcaaggcctaacctgctgccattcatcccccggcaggaatccgcacatgtcccgtgattttcttcgttcgccgctggtcggcctgctcgcctgcctgctggcgctggtggtcgccatgggggtcgggcgcttctccctgaccccgcaactgccgcacctgatccgcgaaggccagctcgacctgaccggcgccggcctgctggccgccgccaactacctcggctacctggtcggcgcgctggacgcgctgttcgcccgcgaagcgcggcaggcgcgcttgcgcctgctggtcgggctatgggcctgcttcggcctgaccctggcctcggtctgggccgagggcttctggccgcacgcgctgctgcgcttcggtcttggcgtggccagcgcctgggtactgatcatggtcaccgccctcagccagcgcctcgccgcggaaagcggtcgggcccggctgggcgcgctggtgttcgccggccccggcatcggggtgatggtcaccggcctgctggcggcattgggcaacgccctgggccaggactcggtgttcatctggaagctcttcgccgacctcgcgctggtcctgatcctcatgctcctgccgctgctgccgcgcccggccgcacgcagcgccggccacgacgcgcctgccacggcgagcgagaacgccggcctcggccgcctgacctgggcctacggactggtcggcctcggctacatcatcccggccacctttctctcgcagatggccgcggcgcgtttccacgggcaatggcaggccgacctgttctggccctgcttcggcctggcctcggccaccggggtagtgctgatcagcctgcgccggcagcgcccggacggcacccgccgctggctggtcggcgcgctctggctacaggccctcggcgtgctcgcctgcctgctgccggggatcggcggactggccctgggggtagtgctgaccggcctgccgttcctcgccggcatgcaactggtgatgcaatacgcccgcgaactggcgccgcatacgccgcagcgcaacgccggccaactgaccaccggtttcgccctcggccagttgctcggcccgctgctggcggcgctcagcacgcatttcgccggcggcctgcaaccggcgctggcgctcgccgggctcggcctggtcttcgccggcctgctgttgcgccggccgcactcgctcagcgtcgcagcaggcgtcgcagccactgctcgccgctgaccagggtgatgccggcgaggaccagcgccgcgccggcgacgaagttcaggctgagcggctcgcccagcagcaatacaccgaaggtgacgccgaacaggggggtcatgaaggagaagatcgccaggttgttcgccaggtagcgacgcagtagccagaaccagcagaagtagctggcgaacgacaccaccacgccctggaacagcacgctggcggtgctcaccggggtccagcggacctcgccgaactggccgctgaaaagagcgatcagcaataacccggcgcatgccacgaacaattggtagaacagcgtcaggcttggcggtgcctcggacagccgggtgccgcgcactgccaccgtggtcgcgccccaggacatcccggcgagcaggccgaaagcgtcgccgagcagcatccgcccatccatttccgcccacgacaggcctccgccgaaggccaccgctatgccgccgaagcacaccgccacgcccagccactgcaagggccgcaggcgttcgctgggaagcaggaagtgcagcccgagggcagagaagatcggcgcggtatagaggaacaccgacatgtgcgaagccgtggtgtattgcaggccgagggcgatgaacaggaactccagggcgaacagcgtgccggtcagcaggccggcgcccagggtgccctggcgcaagccctcccagccgccgcgccagcacatcagcaggccgaccagggcggcggcgatgccggaacggatggccgcctgcatgaccggcgcgatgtccgtcgccgcccacttgatggtcacctgctggatgccccagatcacgcagagcaacagcatggtctggaaggcgaaggcatcggcggacttacgcatggcggactcacaggcaggcatggaaggaagcggccgccagcggcgaccgtcgggcagcgccattatggacaagccggcgcgcccggtcgaagcctggaagcgacctccagcgggccgtgggcggcggttccggcctgcttgcctggcctgggggacgctatccgtcctgcgaacccgccatctggccgcggccgctcacttgccggtcttgatcttgctccaggtccgcgtgcgcagccgctccagcttcggcggcagcatttccaccgaatacagcctggcctgcacttcttccggcgggtagacgttcgggttgtcgcgcaactccgccgagatcaggccgtccgccgccttgttcgggttggcgtaggccacgtagtcggagatcggcgccactacctccgggcgcagcaggtagtcgaggaaggcgtgcgcctgctcgacgttcttcgcgtcgcgcggaatcgccagcacgtcgaaccaggccgcggcgccctccttcgggatgcggtactcgatgcgtatgccgttcttcgcttccctggcccggttggccgcctgcatcgctccgccggaccaggcgatggccacgcagacgttgccgttggccaggtcgctgacgaacttcgaggaactgaagtaggtgatgtacgggcgcagcttcgccaggtgctcctcggctcggcggtagtcttccggctggtggctgttgggcgacaggccgagatagtgcagcacctcggggatcacctcggtgggcgagtcgaggaaggccacgccgcactgttgcagcttcgccaggttctccggcttgaacaccaggtcccaggagtccagcggcgcatcgtcgccgagcaccgcgcggaccttgtcgaggttgtaggcgatgccgttggtgccccacatgtagggcatcacgtagcggttgccggggtccttgccggcgagcaccttgagcagggccgggttgaggttcttccagttcggcagcttgctcttgtccagcggctggaacacctcggccttcaggtagttgggcaggaagctgtcgctgggcaccaccaggtcgtagccggaatgcccggacagcagcttggcctcgagcacctcgttgctgtcgtagacgtcgtacttcggcgcgatgccggtctgcgcctggaagttcttcagggtgtccggggcgatgtagtcgaaccagttgtagatccgtacttccggcgcggcctggaccagcccggcggaaacggccagcgcgaggccggccagcagcttgcgagtcgattgcatgcttcgctcctcagcgggccgcgccttcgtagccctgcagcacgttgaccgcgttgatgccgatggcttccaccgcatagccgccttccatgatgaacagggtcggcaggcccagccgggcgatgcgctcgcccatccgcaggtagtccggcgaatccagcttgaactgggagatcgggtcttccttgtaggtgtccacgccaagggaaatcaccagggcatccggggcgtagccggcgatccgcacgcaggcgtcgtcgagcgccgccgaccagaggtcccagccgctgccatgggccagcggatagttgtggttgcagccctcgccggcgccttcgccgcgctcgtctgcgtagccgaggaagtacgggtattcgacccgcggatcgccatggatcgaggcgaacagcacatcgtcgcggcggtagaagatatcctgggtgccgttgccatggtgatagtcgacatcgaggatcgccacgcgccgggcaccctggtcgaggaacgcctgggtggcgatggcggcattgttgaggaagcagtagccgcccatgaagtcgccaccggcgtgatggcccggcggacggcagagggcgaaggcgctgcgggcgccctggcgcatatgttcctgggcggtcagcgcgacctgggcggagctgtagatggcctgccaggtgccggcggtgatcggcgcctcggtgtcgaagctgtagtagcccagttcgcccatcagcgccgtggggatcggcccgtcgcggcgcaggcggcggccggggaaggtggtggacaccaggtcgccgctgtggccttcggcggtccagcgggcccaggcgccctggaggaagtccaggtaggcggcgtcgtggatgcgcagcagcggctcgcggccgaaatccttcggcgcgatcacctcgccaaggttctgcgacttcacccgggccagcacggtgtcggcccggctgggcatttcgaaacagggttgcagcttgccgtcgaccagttccgactggccgaagtgcagacgatgatcgtcgctgtagacgctcagcatggagagacctcgcaggtttcttgttcttggtggagggattctgcccagcgcgcggtcgcggcaaaacggcggcggcggccaaaaagggatcgatatggccaaaatccatgtccctttagcgccgcctggcgattatcgacgcggggaattactcggcgcccgcgccggtccatactgcttgagccagtcaggatcgaaagggggattcgatgaggcgcgccagcctgcatatgttgctctgccagttcgccatggccctgggcctgctcctgagcctgggcagcgaggcctgggccgccaggccggctccgcaggcggccgtcgacctggaagcgccggccgccctggccgaggacgccagcctcgaccagctcaacgcgcaactcgacctgatccgccagcgcgtcaccgccgacgccagcgacgacctcctcgccgagttgcgccagagcgcgctgcaagtccagcgccaggccgacgccctgctcgcgctgcgggtggccgacatcgagcggctcgacgatcagttgaaagtgatcggcccgccgcagcccgacgaggcggaaagcctcgccgcccagcgccaggccctgacccggcagaagaacgccctgctcgatgacgaacgccaggccacccagctcggccagtcgtcccgcgacctggcggcacagatcgtcaacctgcgccgcagcctgttcaactcgcagatcagcagccgcgcggcgacaccgttcagcccgagcttctggtcgaccctgatccgtcccaccgacgacgacctgcgccggctggacaagctgaaggcggaggccctggtcgccttcgacagcgccatcgcgcccggacaccgctgggccttcgccggaaccctgctggccaccgtgctggtctggagcttcggccgccgcctgctggagcgcatgcttacctgggcgatgatccgctggctgccggaaggccgcctgcggcgcagcgccctggccctggcggtcgggctggcgaccatcctgaccatcgtcggcgcggtgtcgctgatgcgctggggcctggaaagcaacgccagcctgagccccgacatggccagcctgaccgatcaactggtgagcctggcgaccttctgcgccttcatcgccggcctcggccgcgccctgctgatgctgccgcgaccatcctggcggctgccggcgatcccggacaggatcgccagcgccctcggcccgttcccggcgatcctcgcggtggcgctgatgctggtggccaccgaggaacggatcaacagcgtcaccggcaccagcctggccctgaccgtcgccctcaacggcctgaccgcgctggtcaccgcgctgatcttcgccgccgccctgctgcgctaccaccatgtgcggcgcaagcacgacctggagcggccaggcgggatcgccgggctgatccccttcgtcgcctcggtatggatcgcagcgatcctcctcgccctgttcaccggctacctgtcgctggcctacttcctcaccggcaagctgctgtggatcagcgtgatcgcggccaccacctacctgctgatcgctttcttcggcgacatctgcgaaaccctgctctcgcccaagcatcccagcggcctggcgctggccaatgcgctcggcctgtcgccgcgccaccaggcccaggccagcacggtgctggccggggtcggccgcaccctgctgctgctcaccgcgctgctgctggccttccttccggtcggctcgagccccagcgaactgctgcagggcttcgcccaactgggcgaaagcagcaagaccctgggcaacctgaacatcgtcccgcaggacatcctggtcgccctgatgctgttcgtcggcggcctgttcgccctgcgcatcgtcaagcgctggctgagcgagcggttgctgccggaaaccaacatggacgccggcatgcgcgcctcgctggtgaccctggtcggctacctcggcttcgtgctcctggcgatgctggtgatgtccaccctgcgcatcaacctgaccagcctgacctgggtggtcagcgccctctcggtaggcatcggcttcggcctgcaggccatcgtgcagaacttcatttccggcctgatcctgctgaccgagcggccggtgaaggtcggcgactgggtcagcctgggcggggtcgagggcgatatccggcggatcaacgtgcgcgccaccgagatccagatgggcgaccgctccacggtgatcgtgccgaactcgcagttcatctcccagaccgtgcgcaacgtgaccatgggcaatgccctcggggtggtcggggtgaacctgaccctgccgctggacaccgacgcgatgaaggtccgcgaactgctcctgcaggccttcgccgaacacccggcgatcctcgacgcaccggcgccctcggtgacgttcaaggatctcgccagcaacggcctggtgctcaacgccagcggcttcgtcaacagcccgcgttcggtggccggcgcgcgcagcgacctgctcttcaccatcctcgaccgcttgcgcagcgaaggcatcgcgctgtcctcgccacagagcctgctgatgatccaggatggcggcccggccagcgccgcgcctgcgcccgcgacgcccgattgaagcgaaggggcggactgtccgtcacgcaacgggtagaatccgcccctttttcaacgccgaaccgccatgaatcgcgaagccctcgataccctcctccaacacctgctcgccgcgctgtccccggcgccggcggagacccgccgtctgttccatggtcgcggccgctgctggccgggcctggaacaattgaccgcggactggctgcagggcgtcctgctggtgactctgttcaaggagccgcagccggaggaactggaggccttgcgtcggaccctggggcaactgaccacggcgccggcctgggctgcgagccaaggccggcatctggtcctgcagcaccgctaccgcccagacagcgcctgcgaatggctgtcgggcgagccgctggaaacctgggacatcgtggaaaacggactgcgcttccgcctcgacctgggacgcaaccagaacaccgggctattcctcgacatgcgcctgggccgccgctgggtgcaggagcaggccgccggccgccgcgtgctcaacctgttcgcctacacctgcggcttctcggtggcggccattgccggcggcgccagccaggtggtcaacctggacatggcccgcggcccgctcaaccgcggccgcgacaatcaccgcctgaacggccacgacctcggccgggtgagcttcctcggccacgaactgttcaagtcctggggcaagctgcgcaagctcggcccgtacgacctggtgatcgtcgatccgccgagcttccagaaaggcagcttcgtcctgacccaggactaccgcaggattctccgccgcctgccggaactgctggtgcccggcggcaccctgctggcctgtatcaacgacccggccatcggccccgacttcctcctcgaggaaaccgcccgcgaggcgccgtcgctgcacttcgtcgaacgcctggagaatccgccggagttccccgatgtcgaccccgcggcgggcctcaaggcgctgctgttccgcaacgcaggctgatcgacgcgcgggcggcgtgccgctaggctgtcggcatggacatgcccgatggcttcattcccctgccgccacgcgtcgaaccgcaggcggcctttcgccccctgctcgacgacctgcgccgaaccctggcccggcctccgttcgagcgggccgtgcacagcgtctacctgtacggcagcgtcgcccgcggcgaggccatcacggggcgctccgacctcgacctgaccctggtcctgcgcgacccgcccagccccgaactggccgcgcaactggaaaccgcgcgcctggcattgcaggcgcgccacccggaagtcagcaagatcgatttcgatatcggccacctggaccaggcccgcgatccggccaaccgcgatagctggggctattggctcaagcaccgctgccgctgcctgtggggcgaagacctggccagcgccctgccgcccttgcgtccggcgaaagccatcgccctggccctcaacggcgactatgcgcaggtgctggaagactatgcgcgacgcctggaaagcgcgtcctcggaggagaagcgccgccgcctgcaacgggaagcggcgaagaagctgatccgctccagcgacatccttcgcggggagacggagagcgtctggccggagaccctggagcattacctggcgctgtttcgcgcgcggtaccccggacaggcgccggccctggaatatttcaaggccgtgctggacggccaggtcaccgacccggcggtgttcatcgagcgcctgcgcgcattcagcgcctggatgcagcgccaggcgtagcccgccgagacagtcgtcctcagcgtcgggccaacagggccgtggcgccctgggccttgcgcgtgtaccagagcacccggctgacgccacgggtgatcgccacgtaggccaggcgcaggctttcgtcctccatggcctggtcgtaactgttgcggaagaagcccgatgccgcgtacagcgcgttgcgcaacggatgcttctcgcccggcaggcagtcgtcgacgacgatcgccacttcggcctggaggcccttggcgcgatggatggtcatgcccttcaccggcagcgcgcgatccaactccgcctggatcgcctgcaacggctcgttgcgccggctcagcaacagcaccgcggtgcgctcgctgctttcgcgagcggcggcgtgctcgcactgggcgcggatttccgccagcagcttcggcagttgcgcacgcaggtcgaaacgctgcaccagcttcacgccatggtcgcccggctggatcgggcggaacgcgcggcaggtcttgtcctgcttgaaacgcaccccggccagcaccttctcgccgtcgcgaatgatcggttcgacggagcggtagttggtttccagcaccagcagcgcgctcttgcgtccccgcccacgcgaagggaaatgccggtcgaagtcgatgaacagctccggcgaactgccgcgccagccgtagatcgactgccagtcgtcgccgatggccatcaggctcggcgcggtgccctgggttgccaggcgacggtgcaacgcctgtagccagaggacgatctgcggcgagacatcctggaactcgtcgatcagcagatgggtgaacggcgccagcgccgtttccgccagggccccgccggccatccgctcgccgagctgctggaacgcggcgtcgaaggtcatcaggccctcctcgcgcaacagcgcctggaacctcgcccagaacagtgccatggcttcgacgaagatcttctcgcgcaacccgcattccagcttgccgctgtccaggcgttcgacgcgcaggcccaggctctcggcgaacccggcctgggcatggaaggcttcgtacagcggcagcgcctggaactcgccggccagcttgaacggctccagcggcgccttcggctgccgccgcgcgccctcttccggctccgccggcggcggcagttccagcagtttgtgggtcttggcgcggaacgccgggcttgccgcgtagcactgctggtaggcctgcttcagcaggcgctgctgggccggacgcaggcgtccggcggcaagggggttgtccggctcggcggcggggtcgcggtcgtccagttgttcgaaccagcgcggattgccgagcacctcgcgggccaggctgccgagcgccgaatggaaagtgcgcacgcactgccgcgcctgggccgcgtcgaacgggtactgccagtgcgcgagcagccgcagcaattgttcgcgcaactgcgcacaggaggcgttggtgaaggaaatcactgtcagccgctgcggctcgacgcccaggtggcagagcatgaacaccacccgcaggaccagggtggtcgacttgcccgagccggcaccggcgaagatccgcgccagcggctggcggcagaggatcatcgcccactgttcctcggacggcgggctgaccacaccgagcgtcacggcctgcgccacctgctcgcgcatggcgcgctcctgggattcgtcgaccttcagtgcggcagccggatagattccctgcggcgcgcgccgcgaggcggcagcgggcttgcgtggggccccccgaacggcgcccttcgcaggcttgccggcggccttggccggagccttcgcggcgttcttcctggagcgggccttggccggctgcaacaaggcttcgcgagcctcgcgctcggcctgcaggtaggcggtggtacgcgggaaacaacgcgccagggcgctggagagcatcgacttgtagcgccgtacggcagacagcatcggggtccggtccagacaaagcatgtggctgaatcataagtgttttccgccctcggccgacagtcggacgcggaccgcccatcgcgccagggcaacccttgcgcgaccgcgccggtctacccttcgggccctgccggcctgccaactcagcgaaaacaaggagcctacccatgagcgattgggcaatcacctacagcaaggacgaagccaccgagcgccaagtcctgccgttcccccacaagccgagccccgaagaggtcgccgagcacctgctggaatgggccgaggccaacctcaagccgggccactacagcaccggcaagctggaaagcgacgagccggcggaactgctgctgcgccgcttcggcatcgtcgtcactggcatcgccgaagcctgatccctcccgcgaccggcagacgccggtcgcttccgccgataaacgcctgctccgccaagcctacgaacgcgccagccgcgtacctgggccgctgggccaagcgacggttttgctccggccacccggcacctcagcgctcgtcaagggcggcgagataggcgcagagcatatcggccagggcctcagcgtaacgctcgatctccgcctcgctgcgcggctgttcggagaactgcttgccgaccgcgccgagggtggtggtgagcaagtcgccggccaggctgcgctcggcctcggcgacctccggcaaggcctcccggagaaacacctggaacacccgcgcgccctccgccttcacctcccgcgcctcgtcggcgtcgcgatacagcggcgccgcgtcgctcagcgccacgcgtatcgccgcctcttcgcactccgagcgcacgaatgccagcaccagccggcgcaagcgctccagcggcggccgggcggtgtcctcgaggatctcgccgagcagacgcgtggtgcgccgccactcgtcgctttgcaggcggaagaggatcgccgccttgttcgggaaatactggtacagcgaaccgatgctcaccccggcgcgctccgccacccgcgcggtggtgaaacgttgcgcgccttcgctggccagaacctgaacagccgcctccaggatgctcgccaccaactcgctggaacgggcctgctgcggctgcttgcgcgaggaaatacgcgggtttcgcttgtcgctcatggaaggctccggaatgcgaatggcggaatgcgatgaatccgtcgcattctaggtccacgcacttacgcgctcaaacattcccggagccatccatgaataccctcaccaacgccccgctcgccgatctcctgcaacgcctgttcgccgaagccgaagccagcgcaccgggcgacagtcccgccctcgccgacctctcggaggccgaactgaagcgcctcatgggcagcaagaccgaataccgcgagttctacggtcgcctgaaggacctggcgctgcccgtctcccgcgaaaccggctgcctgctctacatgctggcgcgcagcagctcggcgcgcagcatcgtcgagttcggcacgtccttcggcctgtccaccctgcacctcgccgcagcgctgcgggacaacggcggtggccgcctgatcggcagcgagttcgaaccctccaaggccgagcgggcacggcgcaacctggccgccggggggctgctcgacctggtggaactgcgcgagggtgatgccctgcaaaccctcgccaaggacctgccggacagcatcgacctggtcctgctggacggcgccaaggcgctctatccggaggtcctcgccctgctggaaagccgcctgcgccccggcgcgctggtgatcgccgacaacgccgagcatagtcccgagtacctggcccatgtccgctcgccggccaacggctacctgtcgacgcccttcgccgaggatgtcgagctgtccatgcgcctgggctgaagcctagcgactgacggcgtctcgcgggtttgctagggtctggctcatgccgcccggacagctcgaaggagacccgcatgacccgtgaccgactcgccgagcgctaccgcgcctacatcgactgcctgaaccgccaggactgggcgcgcctgggcgacttcgtccatgaccgggtgcgctacaacgacgtgcagatcggactcgacggctacctgcggatgctcgaaggcgacttcctggcaatccccgacctgcgcttcgagatcgaacgcctgctcgtcgatccgccgggcgtcgcctgccgcctgcacttcgactgcacacccggcggccggctgttcggcatcccggtcaacggccagcgggtacgcttcgccgagaacgtcttctacgaattcgaagacgagcgcatcgccggcgtctggtcggtgatcgacaaggcggcggtcgccgcgcaggttcaggcgacgccgccgtcgtcctgaggcgccagggcactgcgggccgaccatctaccaggtatccacgaacggccgcttgcgccccgccctcggcaccggttctccggcgacggccaggccgcgcaggagccaggcgcgggtctccgccgggtcgatcaccgcgtcgatctccaggtagctggccatgttcagcgccttgccgttgcggtaggccttgtccaccatgccgcggaacagcgcctcgcgccgctggggatcttcctcggccgccagctccttggcgaagcccagccgcaccgcgccttccaggcccatggcgccgaactcgccgctgggccaggcgacggtgaacagcggcgaatggaagctgcccgccgccatggcctgggctcccagtccgtagcccttgcgcaggaccacggtgaagaacggcaccgtcaggctggcggcgctgacgaacatccgcgagacgtggcgcaccgtggcctgtttttccgcctccgggccgaccatgaagccaggggtgtcgcagagcgagacgatcgggatgtcgaaggcgtcgcacaactgcatgaagcgcgcggccttgtcgccagccgcggcatcgatggcgccgccgagatggccagggttgttggcgatcaggccgaacgcccggccctcgatgcgcagcagcgcggtgaccaggccgggagcgaactggcgccgcagttccagcacgctgccccggtcggccaggacctcgatcacctggcggatgtcgtaggcacgcaggcggttctccggcaccaggtggcgcaactcgcgctggtcggcgcaactccagtcgggcagcgggccctggaaatagccgagatagcgcctggccaccgcgaccgcttcggcctcgtccgccaccagtacgtcgatcactccgttgggcccctgcacgcccgtcggaccgacctcctcggcggcgaaacggcccaggccgccgccctcgatcatcgccgggccggccatgccgatggtggcgtcgcgggtggcgatgatcacatcgcagcagcccagcaacgcggcattgccggcgaagcagcgaccggagaccactcccaccagcggcaccagcccggagagccgggccatgccgacgaaggtatggcaatcgaggccggcgacgccgacgaaatcggtatcgcccgggcgcccgccgccgccctcggcgaacagcaccagcggcaagcgccactgttcggccaggccgagcaggcggtcggtcttcttgtggttcatcaccccctgggtgccggcgaacaccgtgtagtcgtaggccagtaccaggcaacgcgcggcctgcacgccgaagctggcggcccccaccgtaccggtgccggcgaccaggccatcggcggggctcagctccagcaactcctcggcggagcgccggcgacgctgggcggccagggcgaaaccgccatattcgctgaagctgccctcgtccagcaggtcgagcacgttctcccgcgcggtacgctgtccggtcttgcgccgcctggccagcgcctgcggacgacgctcgtcgcccaacgctgcctggcgctcgagtacctcggcgagatcggcgcggatatgcgccaggtccagcgcctgttcggtcggtgcctgctcgtcgtcatcctccgtcggttcgaggaacagcagcgtcgcgccctcctccagaggctccccgaggctcgccgcgagccgccggacgataccgccgccgggtgccttgacctcgaattccatcttcatcgcttccaggatcgcgacccgctggccggcacgcacccgttcgccctcggccacttccagggccaccagcaccccgctgctcggcgcaggcagaggcaggctgccgagtggcgcctcgacccgcgcaggcgcggcgtcctcggcgagcgggcactcggcgcggagccgcggatggctcgccgggataggcgccagcagtgtctccaggtggctttcgacgaagcgggtgtcgacccggttggcctgtaccgccggatgcagcagaaggttgcgcagcagatccaggttgctcgccacgccctccaggcggaattcgcagagcgcccggtaggcccggcgcaacgcggcgggataatccgcaccacgcacgaccagcttggccagcagcgaatcgtagctggggctgacccgatagccggcatagccgtagccgtccacccgcaggccgggaccgctgggcggttcgtaggcgccgatagtgcccaccgccggacgggcgctgccgtcggccgccagggtctccaggttgatccgcagttgcaccgcgcagccgccgatcgccggcggtcgctccaggccgagggcggcaagctccatgccggcggcgagacgcaactgggcgtgcagcaggtcgaccccggtgacttcctcggtgacggtgtgctccacctggatacgcggattggcttccatgaaatagaagtgcccggggcgcgtcgaccaggaactcgaaggtaccgatcccccgatagcgcaccgcgccggccatgcgcagggcgcaatcgatcagcgcctcgcgggtggcctccggcaggtccgggctgggcgcgatctccagcagcttctgctggcgccgttgcaggctgcaatcgcgctcccagaggtggctgaccgcaccgctgccgtcgccgagcacctgcacctcgatgtgccgggcccgcgccacccgttgctcgacgtataactcggcccggccgaacgccgcctgcgcctcggcacggcagcggcggtaggcatcggccagttgcgcgacctcctccaccgcgcgcatgccacgtccgccgccgccggcaagagccttgagcatcaccgcggcgccatcgcccagcccttccaggaacgcctcggcctcttcgacgctgaccgcgcggttgatcccggccaccaacggcacctccaggcgctcggccagggcacgcgcggcagccttgtcgccgaacaggtcgagcacttccgcttgcggcccgacgaagtggatgcccgcgcgctggcagcgccgggcgaattcgccgttctcggcgaggaaaccgtagcccggatggatcgcctcgcagccctgctccagggccagcgcgaccagccgatccatgtcgagataggccgccacgccacggccggccagcggcagcgcgacatcggccttgcgcacgtgcagggaagcggcatcgtcctcggcgaacaccgccaccgagcggatacccaggtcggcgcaggcgcgagcgatgcgaatggcgatctcgccgcggttggcgatcagcaaggagttgaagggagcggtcacggcaggttctccggggagcgggtcaggcggccggcgaaaggagctggcccggcggcgcgttggtcatcgtcgcaggcatcttaggcagccgaaggaagcggcagaactgaggcttattcatcgacatccatgaagcctatgcatggttctatcggcgagcatgcctgctaggctggcgccttccccagacaggcgcgcgcaaacatgaatcagccacatgaatggtcgcccctcagccgtttcgatctgaacctgttccgggtcttcgaagtggtctatcgagaacgcaacctgacccgcgcggcgggcctcctgcatctcagccagtcggccgtcagccacgccctggcgcgcctgcgcgaccagctcggcgacccgctgttcgtccgccaggggcgcggggttgcgccgacgccgctggccgagcgactggcgccgggcatccatgacgccctcgccggcctgcaccgcagcatgaatcgctgccagacgttcgaccctcggcgcgacgcgcggaccttccaactgaacatgccggagcaactggagccgctggtgctcccggcgatcctcgaccacctgcgccaggccgcgccgcgcatcgagatacgctgcaacagcctgcactgggcggacctgaaggcggaactgggcgccggacgcatcgacctcgccatcgagatcgcccggcccaccgacgccgccctgcgccgccagcacctgctcgacgatagcctgtgcgtgatggccgggccgggcttcgccggcgaactgagtgcggaggagtacctggcggcggaccatgtcgcggtgacctcgcggcgacgcggcatctgcatcgaagacctggccctcggccacctcggcctgacccgccaggtgcgccagcgctgccagcactacctgtcggcggcgttgctggtggcccagggcggctacctgctgaccctgacccgaggctacgccgaactgatcaaccgcggcctgggcaaccgcctgctgccgatgccgctggccctgccagcggtgactctgaatctctactggtcgcgccaggccgacgacgaagccggcagcctctggctgcgcggcgaactggcggagctggcgacgcgcctgcgctgagcgcgggcgctgcgactagggcttcgccgccttggcgcgggccttctgcagccactgcccggccttcgccgaacactccgtgacataggtcgtatcgatcgcgcagcgctccccggtggccttgagcaggtaggcggcatcggctacctcgtagtcggtgtgccggcgcggcgtacccttcgcctgggattcgcgttcgtcctcgcggatgtcgcagtacagcgcattgctgcgggcgaacagttcgaggcactcggcatccttgcccagcaacgggttggcgctgtcctcggcggacttggagcagccgccgagcagcaggcaggcgcaggcgatcgtggcaagcgggctacgcatgtgtccgtttccttggccatggagagtgcgccattaaaacagccccggcgcctcgacgcacccgcggcgtgcccatggtgctactccgcatccccctgccccagcagcgcccgatacttcaccgccgccgcggtccgcgacggcacgtccagcgcccgcagcagcgacgacacatggatgcgcaccgtgtagtgggagatgtccagggcgcggccgatctccttgttgctcttgccctgggccagcaggcgcaggacatccagttggcgctcggtgagcccctccaggcgcgggctgggctgcagcggcaggaggccggagggttcgtagcgcaccagcacttccccggcgcggatggccagaatcgcctggccgagttcctcgggcgcgatgctcttgccgaggaagccgtcggcccctgcgttcatcacttcgccgatgagctgcgggtcgtcgaccatcgagacgacgatcagggtggtgcgcgggaactggcggcgcaggtcggcgagcatctcgatgcgggtcaggccggggaaacgcaggtcgaggatcagcgaatcgggctgctcgccttcgccagccaggcgcaggaccccggcgagatcgccggcctcctcgatcctggcctcgggcagcaggcgctggaggatactcagcatgccctcgcgaaacagcggatgatcatcggcgacgatgatgcggccagtcattcttgtagtctccaggagtcgcagtttccgccgcgcatgctaccttagcccgctaccgccgcgcccacccttcgtccgtcttcgtgacgaagggggcgaaacagaggaaaaggcgcgcggcgctcccatgcacacggaggtgcacatgaagttcgagaagaataccgagctggaccaggccaacctgcgactgatcgtggccacctgcgcgatcctctacgtggtgctgatcggcctgctgcccggcctgaaggtcgagacctacctgccgatcgttgcctactacggcctgttcctgatcgcctccatactgctgcgccaggccatcgtgcgctggccggggcactacccggcgcggcggatcttctgcatgctgcacgactacgccggcacctcgttcggcctgatcgtgggcggcgaggcagcgctgccgctgtacgcggtgatggtctggatcaacctgggcaacggcatgcgctacggctcgcgctacctggccatcgccaccgccctggcgctgctcgcgctactggtcatctatcgactgaccccggcctggcaggcccagccgttcatggtgctgatgctgatgaccaccagtaccgtcattcccttctacgcgcacctcctgctggagcgcacgcgcaaggccaccgaggaagcgttgcaggcgaaccaggagaaatcgcgcctgctggcccaggccagccacgacctgcgccagccgatccactccatcggcctgttcaccgcctgcctgcgcgacgcccgcctgggcgacgaggaacggcgcctggtggacaacatcgaccgctcgctgctcaacgtctcgcaactgttccgctccatcctcgatctctacaccctcgacaacggccggctccagcccaagcaggagaacgtccacctgggcgagttgctgcgcgacctggtccggcgcaacgctgaagcggcgcgctgggccggggtggaactgcgcctgcgcccttgccgcctgtggacgcgaaccgatccggggctgctgtcgaccatgctgcagaacctgctctccaacagcctcaagtacgccgccgagcgcccgctgctgatcggcgtgcggcggcgaggcgacggcctggccgtagccatctacgaccagggccgggggatcgcggaggaacacctgccgcgggtgttcgaggagttctaccgggtacgcgagacgcgcgaccgcgacgtcgagggaatcggcctggggctgtccatcgtccgccgcctggggcagttgaccgggatcgaggtgacgctgcgctcgcgggtcggacgcggcaccgcggtgaccctgcacggcctgccggcggtcgccgcgcaagccctgccccgccgcgacgatcccctgcaggccggcctgctcaccggcttgcgggtgtgcctggtggaagatgatcgcaacgtcctgcgcgccacctcggcgttgctcgaacgctggggctgcacggtccaggcggaaaccgaggcggacggctggcgaaccgattgcgacatactcgtcgtcgactacgacctcggcccccacgcctccggcgtcgagtgcatcgagcgggtacggcggcaacgcggagaggcgataccggcgctggtgatcagcggccacgacatcgagcgtatccaggctagcgtcgaagacaccaacatcgccctgctctccaagccggtgcgccccacggaattgcgcgccaccctgcgcgccctgcgcgagcgcccggcggccgccagccacgcttcctgagacaaggccggtcgagaagcgcaggcctacggcgggccgtacttgatgccggcgcagccgtgggacagcagcaactcgccgtcgtcggcctcgaactgggtgatccgcttgctcttgtcgacggtgacggaaatgatgcagcgattggggtggttgacggtatcccagtagttggtgttcaccatcacgttgccctgcatctccgagctggagcccaccacttcatagcgggaatagctggtgtcggtgtaccactgcatcaccacctgcgagccgtcggcggtgcgctccatgttctgcggcgtaccgaagaaggctatcgcttcctcggctgagcggcccttccactggctgcgggcatagacctcgggcagcgtgtccatctggatacagccgcccagggaaagcgacgccagtaacggcgcgatgaatatccggcgcatgggttgactccgtgtctaggggttcttcggcgggttgccaggcagcaggtcgaaggctcgcaggcccggcgcggcgtcctgcccggacgcttgcgcgcggttcgcctgctcggccacggccattccgctctgtgcgccgacgggtttcctcgacgccgcaagcgaacacccaccggcagagaacgactcgcgcgccggctcgtcgccgctgccgaagcgccaccaatcaccggcgtccgggccggtggcgagtgcggattgccgagtcatggttccttccaagtcgcgtgcgtcctgcacaaccggtttccgcgaaacgcggggatcaagggcgggactatagcgtcgcggcgaagaagctcgaatagcacagaggtactattttcggttcgggcccttgaccacgcagccacttcaaagcagcccctgttgaagcttgtggcgggccttgcaacgcgacggggtcgtgtcgtccgagctcaatctgcctgtagtggaactgaaaagtgttgcatgaccggttggatccgttcctttttcctcgtccgaacccatccgggcgccactaggccgattttctatggcaagggcccacctcagcgtccgctccccactaatgcgacgacacgtactcctcttccccctgcgccggcggcagcgagaatcccgcgcgcaggcgccgggcctcgaccagtggcgaacggccgaacagacgcttgaattcgcggttgaactgcgaagcgctggcgtaaccgaccgcatggcaggcggcctgggcgctcatgccctggcgcaccatcagcagacgcgcctggtgcaggcgcgtgcacttcaggtactgcatcggcgaggtctgggtgatcgccttgaagtggctgtggaacgacggcacgctcatccccgcctcgcccgccagttgcgccagttcgagcggttcggcgtattgcgcgtggatgcggcgcagcgcccgggcaatgttgccgaagcgcccgcgcatggccagggccgctcgcatggcgccaccctgagggccggtgagcacgcggaagtacagctcgcgcagtagcgcaggcgcgaggatcgctgtctccagcggatcgcccagcgcctccaggaagcgcaataccgatgctcgcagcggcgcatccatagggctggacagcaggctgcgcggtgcctcgacctgcgcaagcgcgcgctgacggtcgatctccaccgccagcccagccgccagcgggaaatccaggtgcaggtagatcgccagcagcggtcgctctggcgtggcatcggtctccatggtgaacggcaccggcaccgccacggccaggtagtgctgctcgtcgtacaggtagacctgctcgccgaaatagccgcgctttcgcccctggcaaacgatgacgatccccggatcgtagagcaccggcgtccgcgccagcggtcggtccgaacgcagcaggcggacgctgtcgagcccggtgaggttgtagccctcccggggcgccaggttttcgagcaacgcgaccatgcgctgtcggtcggcggagcggatagcttctgaatcaggcggtgatgtgttcataggatcaggcaataaaacgagaaatacaggtctcttaaacggggagattgctgcgtattgtgcactcattcccccgtaacggagtcatcgccatgtcgtttcgcaaaaccctgttgatcaccggcgccagcagcggcttcggccaggccctggcccgcgaggcgctggacgccggtcaccgcgtggtgggcacggtgcgcagcgaggaggccaggagcacactggaagccgtggcgccgggccaggccttcggccggctgctggacgtcaccgaccttgccgccatcgagccaacggtcgcagccatcgagcgcgacatcggtccgctggacgtgctggtgaacagtgccggctatggtcatgaaggtatcctcgaggagtcgccgctggccgagatgcgccggcagttcgaggtcaacctgttcggcgcggtcgcgatgatccaggccgtgctgccctacatgcgccggcgccgccgcggtcatatcctcaacatcacctccatgggcggctacatcaccatgcccggcatcgcctactactgcggcagcaagttcgccctggaaggggtttccgaagccttgggcaaggaggtagccagcctcggcatcgccgtcaccgccgtggcccccggctccttccgcaccgactgggccggccgctcgatggtccgcagcccgcgcaccatcgccgactacgacgcgctcttcgacccggtccgccaggctcgccaggaaaagagcggcaagcaaccgggcgacccgcgcaaggccgcgcgcgccatgctccaggccatcgacgcggaaaacccgccggcgcacctgctgctgggcagcgatgcactggggctggtgcggcagaagctgaaggcgctggaggaggaaatcgcggcgtgggaagaggtcacgcggtcgacggatggatgaggtttggaaagtcgtagacggataattccacggcattatccgccgataccgcgccgaaccggcggataaccgcactgcggttatccgccctacgccatggccaggttgctggcccgctccgacaacagacagcccttttcctgcaagtaccgaatcgcctgccgtgccgtggcggggttcatcgtattgccgatgaaggtcgtcagcgagtcggtgaactccagcacgatgttctcggtgtagtgccatttccggtagtccacccgggaaatgctggaatacggcttcgagcgcgtgcgaatgacgcggaactcgacacggtccgcatgcaggaccagccgcggggacaggtcgctgtgggcccagcatagccagggaatgcctttccagccggcgaacgcggcgaccaggcgcacgttcaggccgctgtccgtcgcaggatccttcgtcacgcgccctcgcctcccagataacagccgcgctgcttgtccactgtcaccgtatgcccgaagcccaggacgaacctgtcgtggaacggaagcccggcgagccaggaggtcgcgccggtccgcagcctctcgtcgcgcccgcccctcactcccccacccgcccctcgaccctccgcaagcgcgccatgctgtacacatccacgaagcgcccatcccgcaccgcgtagtcgcgcatctctccttcggtctcgaagccgaacttgcgatacagcgccagcgccggggcgttgtcggtgtagacggtgagttcgacgcggcgcaggttcatccagttgtcggcgatgtccagcagttcgccgagcaggcggctgccgacgcccttgccctgccaggcgacggcgacgcccatgccgatgctgccgctgtggctgcggcggatgcgcgggtgctgttcgaggctggcgctgccgatgacgtcgccctggtgcagggcgacgaggatcagcaggcggtcgtcgtccgcgctgtcgtgcaggcgcttgcggcgctgctccaccgactggtagggcatctgcaggacctggcgggccacggcggggtcgttgtacagggcggtgaggccttccacatggcgttcgctgtagcgttcgaggcggatcgtcggcgattcggcggtcattgcggtcatccctgggctgtctggccacccagcataagcgtctgcgccgggctcgaccagccggtcggagatcgcgctttccctgccgcgcggctctggctaagctcgaccttcaaacaacgaaaggacgccagcatggtccagagcgccccagccagcgaaatcgccgccctcatcctgcgcggtttcgacgattaccgagagcagttccgcgagatcaccgacggcgcccgtgcccgcttcgagcaggcgcagtggcaggaagcgcagcgcgcctccgcgcagcggatcaacctctacgaggaaaaggtcgccgagacggtggccgggctgcgcgcggggctggccgacagcgagctgctggacgtggagcgctggccgatcatcaagagcgcctacatcgcgcagatcgacctgcggctggacgacgagctggccgagacctggttcaactcgatcttctgcgggctgttcagccacgacaacatcagcgacggcacgatgttcgtgcacaccacccggccctcgctgcgcgcccacgcccgcgcgccctacacccgcacctaccggccgggcggcgacctgcgccaggcgctggagaagatcttcgacgactaccgcttcgacgtgccctacgacgaccgcgagcgcgacctcgaacggatcgacgcactgctgcacagcaacctgccggactgggtgtgcaaggacccggacctggccatcgagctgatcggctcggtgttctatcgcaacaagggcgcctacctggtgggccgcctgttcaccccggacgagcagtggccgctggtgttcccgctgctgcaccgcgagggccacggcatccagttcgacacggtgatcaccgacgaggcggaagtctcgatcatcttctccttcacccgctcctacttcatggtcgacgtgccggtgccggccgagctggtggccttcctcaagcgcctgctgccgggcaagcacctggccgagctgtacacctcgatcggcttctacaagcagggcaagagcgagttctaccgcgccctgatcaaccacctggcgaccaccgacgaccgcttcgtcatggcccccggcgtgcgcggcatggtgatgagcgtgttcaccctgcccggcttcaacacggtgttcaagatcatcaaggaccgcttcaacccgtcgaagagcgtcgaccacgccacggtgatccagaagtaccagttggtgaagaaccacgaccgggtcggacgcctggccgacacccagcagttcgccgacttccgcttcccggtgagcaagttcgagccggagtgcctggcagaactgctggaagtggcgccgtcgacggtggtggtggaaggcgacgtggtgctgatccgccactgctggaccgagcggcgcatgaccccgctgaacatctacctggagaacgccagcgaggcacagacccgcgaggcgctgaacgactacgggctggcgatcaagcaactggcggcggcgaacatcttccccggcgacatgctgctgaagaacttcggcgtgacccgccatggccgggtggtgttctacgactacgacgagatctgctacctcaccgaggtgaacttccgctacatccccgagccgcgcttccccgaggacgagatgtcgtccgagccctggtattcggtggggcccaacgacgtgttcccggaagaatttccgcgcttcctgttcgtcgacctcaaccagcgccggctattcgccaagctgcacggcaacctctacgacgccaaatactggcagggcctgcaggagcagatccgcgagggcaaggtgatcgacgtgtttccctatcggcggcaggagacgcctgagcagttgctcaagtagaccgaaccagccgcccattcctagaccaactgcgcccccagcgcccgcaccacccgctgcaactccgcccgtccaccggtggcgacgcgcaggccggtgatctcgcggcgcggcgggtagtgtttgcgcagggcgtcgaaggcggcgcggcgggtggcgctgtcgccggtcaggctgcgacggaaggcggcgtcgtcgctgcgcgggtcgtataccgcgcggcacagcgtggccagcgcccagaccgggtcgcagccggggttgagttgcaggccggcgagccaggtttccggcagcacgtcttgcaggctcacgcgttcggcgatgccgcgccaggcgcagtaggcctggtagatctgtgcggtgccgcgcagcttgccttccaggctgtagccggcgatgtgcggcgtggcgatcaggcagtgcgcggccagttcggggtcggcctgcggttcgccttcccagacgtccagcgccacttccaggtcggcgccgccttcgagcaggcggcgcagggcctggttgtcgaccaccgcgccacggctggcgttgaccagccaggtgccgggacgcagggcggccaggcggggttcatccagcaggtggcgggtcgggtgttcgccgtcgtggttcagcggagtgtgcaggctgatcacgtcggcctcggccagcagccgttccagcgagacgaattcgccgtccggctcgcgcgcctggcgcggcggatcgcagaccagcactttccagcccagcccgcgcagcacctccaccagccgcccaccgacctgcccggcgccgaccaccccataggtgcgttcggccaggtcggcgccgcgcacctcggccatcgccagcaggcagccgagcacgtagtccaccaccccgcgggcgttgcagccgggcgcgctggaccaggcgatgccggcctcggcgaagtagtcgaggtcgaggtggtcggtgccgatggtgcaggtgccgacgaagcgcaccggcgagccggccagcgcggcgcggctgacctcggtgaccgagcgcaccagcagcacgtcgacctcggccagcgccgcgcggtcgatggcgcgcccgggcaagcggcgaatggagccctggtcggcgaagaaggcgtcgaccacgggaatgttttcatcggcgagaatacgcatgcagacctccgcgaacgaggctgcacactctagcaggccgagggctcgcggtgtggccgaacggctcgcgaggcggacctgccagcgccatgcgcaagcctcgacgatcgcgtttttcccaaccacgaccgcgaacgatggccagctacaaggaacagaaccgcgaacgcctcgtccgtctcctcgaccaggcggcggacgccagggagcccgttcatcgagccggtagctcgctccgctccggcatggccgccaggcgctggcgcatttcctcgctggcggcaggcccggcctgcacggtgcattgctccagcggtaccgttcggccatcggcgagagccgccatgaacgagcgcaccggccgcccgcttgttcgctcgacgagctgcacgctctgcccttcctctgcgtagtggcgattgccccaggcgacgaaagccatgagcacgacgcgaaaatcctcgcccttggccgtgggcacgtactgatagcgcagcgggcgctggctgtagggctggcgttcgagcaggcccgcctccaccagcgcgttcaggcgccgggtgagcatgttcggcgcgatatccaggctgcgggaaaattcgtcgaagcggcgcaggccctgtagcgcatcgcgcatgatcaggatgctccaccattcgccgacccgttccaggctgcgggcgatggggcattcggcatcggcgaaggtcttgcgttgcatggttcttccttggcgaggctcacaaagtgctggtccgcatgttactttcatgatgatagttacgtccactgactgctattccaacggaacagaaggactcggaccctcatgagcaaacgtatcgtcgtcaccggcatgggcgcggtcagcccgctgggctgcggagtcgaacccatatggcaacgcctgctggccgggcaatcgggcatcgccaagctcccggcggagctgatcggcgacctgcccatcagcatcggcggccaggtccccgaccgtgcccgggacccgcaggccggcttcgatcccgacctgctgctggccgccaaggaacaacgcaagatggaccgcttcatcctcttcgccctggccgccgcgcaagaggccctggcgcaggccggctgggcgccgcagagcgccgaggcgcaggagcgcacggcgaccgtcatcgcctccggggtaggcggcttccatgccatcgccgaagcggtgcggaccaccgacggcaaggggccgcgacgcctgtcgcccttcaccatcccgtcctttctctgcaacatggcggccgcccatgtgtcgatccgccatggcttcaagggaccgctgggcgccccggtgaccgcctgcgcggcgggcgtgcaggccatcggcgacgcggcgcggatgatccgcgcgggagaggtcgacgtggcgctctgcggcggcgcggaagcgaccatccaccgggtgagcctggccggcttcgccgccgcgcgcgccctgtccagcgatttcaacgacagccccgaacgcgcctcgcgccccttcgaccaggcccgcgacggcttcgtcatgggcgaaggcgccggcctactggtcatcgaggaactggagcacgccctggcgcgcggcgccaggtccatcgccgagctggtgggctacggcaccagctccgacgcctaccacatgaccgccgggccggaagatggcagcggtgcccgccgggccatgcagcaggcgctgcgccaggccggcgtggaagcggccgcggtgcaacacctgaatgcccacgccacctccacccaagtaggcgacaagggcgaactggccgccatcaaggccgtgttcggcaccggcagcgggctcgccatcagcgcgaccaaatccgccaccggccacctcctgggcgccgccggcggcatcgaggcgatcttcacggtcctggcactgcgcgaccagctcgcccccgccacgctcaacctggaaacgcccgacaccgacgccgagggcctcgacctggttcgcggcgaagcccggcgctggccgatggaacacgcgctgtccaatggcttcggcttcggcggggtgaatgccagcctgttgttccggcgctgggtgtagcgcgtcctactctggaagcgatcgtgccagatgcctgccctctgccagcagcccaagctcccgctggtggagggacatcagttcgccgccaggccatgtcgagcatgagttcagacacatgaggtcttttccgatgcggcagttacatcatgacggcttttacgagcgatctggagcaagtatcaggagggtaatgtttaggtaacgcacccaattagcgttttcgctccaagctagccatgaatatctaccaaggttatttacaatctcaaagatcaggggccctggtattcttcatgggaaaaaagtttcaggcttaactcgcaggctttcagatttaagaaatctccaccacagggaggactcgcagaaaaaaccagccttccaacccaaccagaccaacgccatgcttatcgacttgaaatttcgccgacctgaactagcatgcctattaaactcttggctcatttactacaaccagaaaacagggagacttgcatgagagttaaaaatgtatttatattcacggttggactcaagggctgcagcccaatacctagcgtacttggcatttaccacaagtatgcatcaagaagcgaagtcaaattcattggctggtaccacctttctgcgaagcgctcgcagagcgatatccaggaaatcttctcgaataatagcgatgagcctttgaaaggtttcgaagtgttggaggccgaagccgttacaaggcatgccactgaagacattcacactccagacttgtcaacacttcaaggagatgcgggcgcaataattcttgctcacggtggaggggctcaggcgggaagcagcagtgccgaggccgtggcgaaagcggtcgctgacttcagaaagaaaacaaaactgcctatgcaatttagaaaaatagtatttgacgtatgcaacatggcctcccccatcaagacggtcactgccgaccagagcaagttctccgaaataggtttttacgacagcgaaggaaatgcaatcgccaagtcaaaagaatttcagttaaacttcctacaggcattcaccgccatctatggagcactgacacacgatgccggatcagtaaaagttgcgggatgggactctggaatttcggtctttcatccagccaacgaatatgtcatgggcacacctgcgccagctaatggctggactgcaaccgtcagcaatcgcgagctcgtcgcgacactcaagcatgggcagaaattcctcagcaatagaatcagtgatgaggagaattcaaaaaccacctacacgctcaaatttattgacaatggcgtcagggcctcgcttaaaaaaacctaccagtatgtatcagttcagaatgaaggcgaaaagggcaaagtaatccagacaaaactggaaggctggtcggacaaagaactgtagagaaacgagcctaatcattaggctactctaaccagccagctcttatgattttccagcccgcacgccaccatcatgccgctccccgcaagccggccaactaacgctcaaatccgaagatatttcgaatacggaatccgtagaagaagagagcacactggcccctttttaccgcacgctgtccctaacgaaaacaactaccgtcccgcggcagccctcgaaagttccccctccggtttcggacggcagctctctagcctatcctcccccgccacaaccccaggaggccccatgccggtttcgttacccttcgagcaagtcgatgtcttctccgaacagcccttcaaaggcaacgccgttgccgtggtgattggcgccgaccgcctgagcagccagcagatgctcgagttcgccgcctggacccagttgagcgagacgaccttcctgctgcggccgaccgttgccgaagccgactatcgcgtgaggatcttcaccccgttgcgggagttgccctttgccgggcatccgacgctggggagctgccaggtctggctgaaccaggggggcggcaatgctgctgacgagatcgtccaggagtgtctggcgggcctgatccgcatccgccgcaagggcgccttgctgtcgttcgcggcgcctcccctgcttcgtggcggagcggtcgaagacgaggtgttgcgacggatcgagagcgggcttggcctgtccccggggcaggtactcggcagccaatgggtggacaacggacccggctgggtcgccgttcggctggccacgcgtgacgaggtcctggccatccgcccggactacgcgaagctcgacgggctcaacgtgggcgtggtcgcgccttggcaaggtccccaggcggaggcggatgtggaagtgcgcgccttcatgggcgaggaactcaatgaagaccccgttaccggcagcctcaacgcgagcctggcgcaatggctgatcggcacgggagtcatgcccgggcgctacacggcgagccagggcacggccttgggtcgccgggggcggataagcgtcgagcagatcggcggcgatatctggatcggcggtgaggtgcagccgggcatgtcggggcaggtcgtgttctgagcgggacggcgtaccctgtccttccccattacctggccgacctggatcggcgtccggcattggacggaaatgcccgcccatgacaacggggccgccttccctctggaagcaccctccctgcccaccgggcccgcccaggcccggtggctccgccctcccctcaccagttgtgcgtatagctcgccgtcagcaccgtgcccggcgccggcaggtggctggtgttgttgttgttgcgcagcaactggctgtagagcgggtagtagtcgcggttgaacaggttctggatgcccaggctcaactggtcgtcgggggtgatgcggtactggctgaccaggtcgaccgtggtgtaggtgctgacctggcgccggccgaagctttccacgccgtcgagacggtagtccttggagtcgaagaaggtggcctgcaggcggttgttccagtcggcatccggcttgtattgcaggtaggcggtcagcttcagcggcggcacgcggtagccggtcatgtcctgccagtccttgccgtccggcttctcgcgtccgcgcatccaggtggcgctgccgcccgcgccccagacttcgtcgtcgctgagccagtcggcgctggcctcgacgccgtagatgcgctccttggtgcgggtgaggatcaggccgttgttgaagctctgcacgtcgcccagcttggaggtggtgtagaacagcgccaggctgcccagggtgttgccgccgatggcgccacgccagccgagttcgtagttgttggtcttcaccggttcgaggttcgaggagccgatatcgaagccacggcgggcgttgcgcagctggatgccgacatcgggcagctggaagccctggctgaaggaggcatagatttcctggccagccaccggcgaatagacgatgccgaggttcgacagcaccgcgtcgtagtcgaggtcgccgcccttgacggtcaccggcgaggcggccttggactcggagagcgggatgaagtcgtcgaattcggcggtggagtattcgtagcgcaggccgccgtcgatcgaccagtgttcgtcgaagcgatgctgcaactgggcgaacgcgccggcgctgcgggtgcgtagcggcggcatgtaggtgagcttgccgatcttgtcgaagaccagcccgccgctggcgtcgtaggccgccgggtcgaacacgtcgagcggcatgtcgctgcgttcctggttgtagtcgccgccccagaccagttcggtattgccgctttcgcccagcggcgtgcgcagggtcaggcggctgccgaacacttcgctgttctgcatgatctggtcgacgttgccgccgcgggtggagacggcgcgggcgtcgaacggagtgaagcgggtgaaatagtcgcggtagtagagctgcgcggagagccggctgccgaggatgtcgaggttctcgtactcgaagttcgccagggtgttgcggatgcggttctgctcgtccagctccaggcccttgaccgcgttggccgggaccgagcccggcggcagcctggcgaccctcgggtcggtggcgtagtcggtgtcctggcgggcgtcgtagtggctgagggcgagctgcacgcgctggttctcgtcgatgcgcaggccgagcttgccgccgatgttgtagacgttcgagtcgaacaggtcgccctggctgggttccggggcgatgcggtcgccatgggcgtcgtaggaagcgccgacgtgacgggtgccgaagtcgaacgaatagtcgagcgcccccagggagccggcgaagtattgctggaactggccgccgaggccatcgctacccagccgggtcagcggcgaggtggcgctgaggcgggtttccgcacggttctcgccgccggccggacgggtggtgatggagatgatcccgccggtggcgccgctgccgtagatggcgctgctgccacggatgacctcgatccgctcgatcagcgccgggtcgatgttggccaggttgcgcgaggagtcgcggttggtgttcagcggcacgccgtcgaccatcaccagcatgctgcgcccgcgcagggtctggccgtattcggtgatggtgcggctggaatcggacatccccggcaccgccttggccagcacggtggccaggctgtcggagccctggcgcagctcctccagttgggcatgctcgatgacggtggactggcgcgtggcggagaccaggtcgctgctggtgcgcgaggcggtgatttccatctgctccatgtccagcggttcgctgcgggcttgcgtagcgggcacggcggcttcgctggccggaacgacgatgaaggtatgttcgtccctggcctgcgccttcaggccgctatccctgagcaactggcgcaatgcctcttcgggggtgaaacgccccttcagcgcgggcgcctggcggccggcgccgagatcgccagcgaaaaggatctgtaccgaggattgttgcgcgagggcgttgatcgcctggccgagcggcgcggcgggcagatccacgtcgagcttttcctggccctgggccgacaccgccaggagcaggctgctggcgagcaatgaaggacgcaggtggcgactgcggagggaaaaatgcacgtctcgatttcctatgcaggttggcttttcctggatagccgccacggcgcgcgggaaaccctacctgcgtccgagaattattttcgcgtcgatttgcgttggatctcgacgctgccgtcctcctgccgcgacacggccacgggaaggatgctcggcagcaggtcgagcagccggtcggcgttgtgcgcggcgaagacgccggtcagccggagggaggccaggctggggtcgtccaggagaatgggcgccttgcgataatggcgcagcagcgcgacggcttcgcccaggggcgtgcgctcgaagaccaggcggtcgtctttccaggccatcgccgtggcggcatcgaccttggccagcggcatcagttgcccaccaatggcatcgacctgctggcccggcaggagcacgactggcgcttgcgccgtagccgaggtgccgacctccacccggccacgctccagggtcacgcggacatcgtcgtccaggcggcgcacgttgaaccgggtgccgagcacgcggatgtcggtcgaacccgcggacaccacgaagggccgatagcgcgccggggatacctcgaaaagcacctgccccgcgcgcaacgcgacccgacggctgagcgggtgccaactgacctcgatctggctgccgctgtcgagcaggagctggctgccgtcagccagggtcacgtcgcgccgctcaccgatggcggtggcgaagcgctcgcgcttgtaggccgggtccagccaggccagggcgccgatggccagcgccagcaatagcgcgacgccggccgccttgcttgccttgcgcgatttcggccgggagggcggcagcgggaacaggtccttcagcgcgtcgcgatggcgctccagggcgtcgtccagcggaacctgcccattccgtttcgagggctgggtcatggccgtgcctcgccgcggccgagccgttcccggcaggccgccagtccgaggcgcaggtgcttttccacggtcttgacggagatgccgaggcggtcggcgacttgcgcctggggaacttcgtggatcttgtgcatgacgaaaacggcctggcagcgaggaggaagcgtggcgatggcgtcgaccagtgcctggaactcgcgctcggcctcatggcgacccatgggcgtcgccgccatgcaggcgacttccggaagctcggcgacggcttccacccaggcggttcgacgacggtcgctacgatagcggctcacggcggcgtcgtgggagattttccgcagcagggccaggggcgtgtgcacgtcctccttctcgtcgcgttcgagcaactgcacgcacacgtcgtgcaccacttcgcgcgccatgccccggtcgccgaagcgccggcgaacatggtcgaccagttcctcgtagtgacgaaccagtgtggacaacagcgtcggcttggcgggatcgaacggcacgatgcacccaggaaaggagcctggctccgaagaatgggggtcgagtgtaaatgagaaacagtcgcagatgaaagaccggtcatcgtcagggattgcctgggttggcgtgcgtagcgggcaggtggctttcgcccgaccgcgcaactgccgagccagggcggagagggatccccttttcgccccgctactcaaccccccggccttgccggggggcaccgcctccgtcggttatcggtgtctgcgtgcgtattccgcctcgaacagcgacagggcgtcgctgagcaacgacagcagggaaccggtgatgcggcagatgctttcaccgggctcttcggtttcgtcgagcaggtcgaggacgctcagcgttccgatcgccgactccagccggcggcgggcggtgtcgaacaggtcttcgctggctgcgctgctgtccaggtagagggtggcgcaaccggggtgctggttgcattgcgaggtgcgtcgcagggggatgaaggtggaaggggactgtgcggttattgcgggattcgacgtatcatcggccttagccatgggtcagctcctatcgttaagctggtctctggttagcgggtcgtaggtgttcctgcacctgcggctcgcgtcttttctgcccccaagaaaacagacttggcgacccctccatcttcctcctactggttttttatccaattcctgggcgtctgagagaggctgcggaaaagtctgggggagatgtccggcgtttccagggcatgtcatccgccgctgtcacgggtatccggcggataaccgccaggcggttattcgccctacggggtcgggcctcaagcgggcagcgcggggtcgtttgtctgcgcgtagcgcggtggggggctgggcaaccggcacgaccctgctgacccttcctgaccaccccgtcaacccgtaaactacgcggttcccctgcccagacaaggactgccgtgaacagccccgccctgcccctttcccgtggcttgcgcatccgcgccgaactcaaggaactgctgaccctcgccgcgccgatcatgatcgcgcaactggcgaccaccgccatgggcttcgtcgatgcggtgatggccgggcgcgccagtccgcacgacctggcagcggtggcgctgggcaactccatctggatcccgatgttcctgctgatgaccggcaccctgctcgccaccacggccaaggtcgcccagcgccatggcgccggcgaccagcccggcaccgggccgctggtgcgccaggcgctgtggctggcgctgctgatcggaccgctgtcgggggcggtgctgtggtggttgtcggagccgatcctcggcttgatgaaagtgcgcccggaactgatcgggccgagcctgctgtacctcaagggcatcgccctgggcttcccggcggcggcgctgtaccacgtactgcgctgctacaccaacggcctgggacggacccggccgagcatggtgctggggatcggcgggctgctgctgaacatcccgatcaactacgcgctgatctacggccacttcggcatgccgaagatgggtggccccggctgcggctgggccaccggctcggtgatgtggttcatgttcctcggcatgctgttctgggtgaacaaggcctcgatctaccgcgccagccagttgttctcgcgctgggagtggccggatcgcgcgaccatcggcccgctggtggcggtcggcctgccgatcggcatcgcggtgttcgccgagtcgagcatcttctcggtgatcgccctgctgatcggcgggctcgacgagaacgtggtggccggccaccagatcgccctgaacttcagcgcgctggtgttcatgattccctattcgctggggatggcggtgaccgtgcgggtcggccacaacctcggcgccggcctgccgcgcgacgcgcgcttcgccgccggcgtggggatggccgcggcgctgggctacgcctgcgtctcggcgagcctgatgttgttgctgcgcgagcagatcgccgcgatgtattcgccggacccggcggtgatcgccatcgccgcctcgctgatcgtgttctccgcgctgttccagttctccgacgccctgcaggtcaccgccgccggggccctgcgtggctaccaggacacccgggtgacgatgatcatgaccctgttcgcctactggggcatcggcctgccggtgggctacagcctcggcctcaccgactggttccaggaacccaccggaccgcgcggcctgtggcaaggcctggtggtgggcctgaccggcgcggcgatcatgctctgcatccgcctggcgcgcagcgcgcggcgcttcatccgccagcacgagcgcctgcagcgggaggacgcggaggccgcctcagtccttggccggtagcgccggggcggcgccacgcgacttgacgctgagggtagtgccgaccgaggcgaggatgatcgcgccgatggccagccattgggtcgggctcagccgctcgccgaggaacagcagcccggagagcgcgccgaaggccggctcgatgctcatcagggtgccgaaggtgcgcgccggcaggcgggtcagcgcgaccatttccagggtgtagggcaaggccgtggagagcaccgcgacgcccagcgccaacgggatcagcgccgggtcgaggaggtcggcgccggcgtgggcgacgccgatcggcaccaccaggatcgccgccaccagtacccccagcgcggcgccctgggcgccatggtcggcgccggcgcgctggccgaagaggatgtacagcgcccagcacacgccggcgccgagggcataggcggcgccgaccaggtcgagcggctcggcgctgttgcccagcggcagcaacagccagatgccgaacaccgccaggccgatccagaggaagtccagcaggcgccgcgaggagaggatcgccaccagcagcggcccggtgaactccagggccaccgcgatgcccagcggcacggtgcgcaccgagagatagaacagcaggttcatgccgcccagggcgatgccgtagaccaccaccgagcgcagcgattgcaggctcaggcgcttgcgccagggacgcaggagcagcagcaggatcagcgcggcgaagaacagccttagggccgtggtgccctgggcgccgaccagggggaacatgcttttcgccagggaggcgccgctctggatcgaggccatggcgatcaatagcaggccgaccggcaacagcgttccggcgaggccgcgggaggtggaggtcatggaagaggtccggcagtgggaagcagcccgatggactgcgggaaacgggatgtgcactataatgcgcaaaaccgcgacagtgagcaatatattgcccaaccctaccgaacgccccagcgtcctcgaacatgtctccggcaacgtccgccgcctgcgcctgcaagccggcctcagccaggaagcgctggcccgcgcggccagtgtcagccggcggatgctggtgggcatcgagagcggcgacgtcaatgtcagcctgtcgaccctcgaccgtatcgccgccgccctcggcgtgctgttccccgacctggtccaggcaccggccaccgaccgctcgcggatcaatgcggtggcctgggtcggccaccaccccgagagccgcgccaccctcctcgccagcgcaccggcgcggcgcgaggtggaactctgggcctggtcgctgggaccgggcgagcgctacgtatcggaacccgacgccgccggctggcgggagatggttctggtcatcgaaggtcgcctgcgcctggaactggccgacggcgaacggcgcatcgaggccggcgacttccatgccttcgccagcgaccagccgtacgcctacgtcaacgacggcgacgaggtggtgcgtttcacccgcaacgtggtgagctaggctctagcctcgagccagccttccagaggagaccgcgatgagcgcacgcgtacgacccttcctgatgttccagggggtccaggccgaggcggccatgaacttctacctgtcgctgttcgacgacgccgagatcctccagatccagcgctacggcgccgaggggccgggcccggagggctcggtgctgaaggcgctgttccgcctcggcgaccagagcgtgcattgcatcgacagccatgtgcggcacgccttcgatttcaccccggcgttctccttcttcgtcgactgcgagagcaacgcgcagatcgagcgcctggccgaggccctgagcgacggcggcaaggccctgatgccgctcggcgactacggcttcagccagcgtttcgcctggctggccgaccgcttcggggtgtcctggcagctcaatctggcctgagcccggcagttgccgtcaggcttcctggaggacttcctggcacacatcgacccactgcgcatccaccagctcggccatccgttgcggggcgatgcggaccgcgctgtgcaccgccccggcggccggaagcacttcgtcgaaggcttgcagcgagacgtcgcagtacaccgccagcggcgtcgccaggccgaacgggcagactccgccgaccgggtgcccggtcagctcgaccacgtcctcggcgccgagcatcttcgccttgccgccgaaggcggccttgatcttgcggttgtccagccgcgcgtcgccgcgcgccactaccagtacggtgcgctcgccgacccgcagcgacagggtcttggcgatgcgccccggctccacgccatgggcctcggcggccagggcgacggtggcggtgctggtttccagctcgatgatgcgcaggtccggggctttctcggcgaagaaccgccggacggattcgaggctcatggggtgggctccttggcgaaaacccacgaacttatgcaagcgcgccgaggctgtccagcgccgcgcgctcaggcgaagcgcacgcagtagatcggcggcaggttggcggagagctgctgccagtcctccccgccgttctcgctgagccacaggccgccggtggtcgagcccatggccaggcgctcgccgctggggtcgatgtccaggccgtggcggtagaccaggtcgtaggccgggccatcgggcaggccgcgctcgagggtctcgaagctgtggccaccgtcgcgggtgcgggtgaccacgaaacgggcgtccctgggaatgcggcattcgtccttggtcgccgggacgaaccaggccgtgtccggctgccgcggatgcacggcgacggcgaagccgaagctggacggctcggcgaccacaccctgccaatgcaggccgccgtcgcgggaacggaagatgccgttgtggtgctgcacccagaggaactccgggcgcgcctggcactgcaccaggcggtgcgggtcctggatcgccgcctcctcgctctgctccggcggcatgtagtcggcgcgcatgcctctggtggtgcaggtccagctgcggccgtcgtcgtggctctgccagacgccgccgcaagacaccgcgacggtgaggtggcgactgtcgcgtgggtcgacgcagatggaatggatgccgggatggtcgtagccgccgccgaaccactgggcgcgttcgggtcgttcccagagttcgcggttgaggcgccagctggcgccacggtcgtcggaacggaacaggccgccggggatggtcccggcccacagcgtgccgggccggtcggcgccgcctggctcgaggatccacaactgctgtagcgaccagggtggctccgccgcctggccttccagcggttcggccgctggcggctgcggcggatagaccggcaccgcgcattccttccagtccgtcgcgccggcgtcgcgacgccacagcttgacgccgaaatggccgagattcagcgccgcgtagagcgcgccgtcgcgcgggtcggcgaggagcatgctcagcggctcgccgaggaagtggctggccatcggcagccactggcccgccgcgttgcgccgcagctcgaacaggcccttgcgggtgccgacatagagtcgctcgctcaccggatgttctcctctgttggtcaaccgccgctcagcgcctgcaccacgtagatctcgctatcgtcttggagcggatcgcccaatccccggcgatcgcggacctgcacgccatcgacgaacagcgccacatgccggcgcaggctgccctggtcgtcgagcaggtagccgcgcaagcgcggctcgcgggcgaaggccgcctgcaaggcggcggcgacggtggcggcgccgacgtccagcgcgggcatggcgacgtgccgctggatggccggggcgaagacgatacggggcatgccgaggctcgcggaaatggctctgccggaacagtgtagaagccctgcaggccacggctggcgcggcccgcccagcggtcggcacactccgcagcgacgctcgtcggccatcccggccgctcggcgcgggcctcctatactgccccggccagcgaaaaaaccgccgtcgcctgtcgatccgccggcctgccgttcgaccagttcgggaggcgggccagaacgggccgtcattgcgcagaacaacaaggagaacgcagatgagattcatggtgatcgtcaaggccacccaggcttccgaagccggcgagatgcccagcgaggaactgctcgcggcgatgggccgctataacgaggaactggtcaaggccggggtgatgctcgccggcgaagggctacagcccagcgccaagggcgcccgggtgcgtttctccggcaacgcgcggacggtgatcgacggccccttcgccgagacccgcgagctgatcgccggtttctggatgttccaggtggcctccctggaagaggccatcgagtgggtcaagcgatgcccgaacccattcgacggcgaatccgagatcgagatccgccaggtcttcgaggccgaggacttcggcgaggagttcaccccggaactgcgcgagcgcgaggagcgtctgcgcgccgagctggaaaaacgcaactgaaccgccccgcactccgccaagaacgaggaaagcgccatgcaaatcgtcccctacctgatcttcaacggtaattgccgggaggccttcagctgctaccaccagcacctgggcggcacgctggaggccatgctgccgttcggcgacagccccgagtgcggcgacatcccggccgactggaaggacaagatcatgcacgcacggctggtggtcggcagcttcgccctgatggcctcggacaatcacccggcctatccctacgaaggcatcaagggctgttccatcagcctcaacgtcgacagcaaggccgaggccgagcgcctgttcaacgccctcgccgagggcggctcggtccagatgccgctgggcccgaccttctgggcggcgagcttcggcatgttcaccgaccgcttcggcgtggcctggatggtcaactgcgagcaggaccggtagcgtccgctacgcgggcccgccgccaggtgaatcggcggcgggcccgcgttccactgtgcgcgagtcgcgatcgatagacgcactgctgcgataatttaggttgcattttaaaaccaaaattcctagcctccgctttagtttcatattgaaaccttacggagcgcttcgcatgccatcctcgccatcctccctcccctccgcgctggtgctgctgttcgccgtcgcctgcggtctcagcgtggccaacgtctattacgcccagccgctgctggacgtcctcggtgccgagttcgccatcggccaggccggggtcggcctgctgttcggcgcgacccaggccggttgcgccctggcgctgctgctggtggtgccgctgggcgacctgctggagcggcgccggctgatgttcgtccagctcctgctgctggtgctgtcgctgctgctggtaggcttcgccggcgataccctcggcctggcgctggggctgctcggactgggcctgctcggcaccgccatgacccagggactgctggcctacgccgcggcgctggcggcgcctggcgagcgcgggcgggtggtcggcgcggcgcagggcggcgtggtgatcggcctgctgctggcgcgcagcctggccgggctgctcgccgacctcggcggctggcgcagcgtctacctggtctcggcagcgagcatgggcgggctcggcctgctgctctggcgggtactgccggcggcgccgagcaacgaactggggctgacctaccggcaactgctcggctcgatgttcggcctgctggcgagccagcgcgtgctgcaggtgcgcggcctgctcgggctgttgatgttcgccgccttcggggtgttctggagcagcctggtattgctgctcggcgcgccgccgcattcgctgtcgcacagcgccatcggcgccttcggcctggtcggcgcgctcggcgcgctgggcgcggcgcgggccggcagcctggccgatcgcggccacgcccaggcgctcagcggcggcgccctgctgctgttgctgctgtcctggctgccgctcgccctcggcgcgcattcgctggcggcgctgattctcggcgtgctgctgctcgatctcgccggccaggcgatccatgtgctcaaccagagcctggtcttcgccatcgacccgcgcgcccacagccgcctggtgggttgctacatgctgttctacgccgccggcagcggcctcggcgccagcgccggcaccgccatgtacgcctgggccggctgggacgcggtgagcctgctcggcgcggcgatcagcctggcggccctggcgttctggtggttcacccgtggcgttggcggcgaagcgcgtacggcctgcgccaacggcgcctgagccggcttcaatcgagttcgcgcaggcgctgctcgatgaagcgccgctccggctcctggcgcgccagggccagcgccgcgcggtaggcctcgcgggcctcgcggcggcgaccgagacggcggcagaagtcggcacgcgccgagtgcgccaggtggtaatcggccagttcacctcgcgccagcaacgcatcgaccacggccagcccgacctcgacgccatcgcgcatggccaaggccacggcgcggttgagttcgatcaccggcgatggcgccaggtacagcagcgcgtcgtagagggcgacgatccgtgcccagtcggtgtcctcggcgcgcggcgcctgggcgtgcaccgcgacgatggccgcctgcagggtgtagggcccgaaacggcggctggccagggctcgctcgaccaggccgagcccctcgacgatcagtccgcgatcccatagcgtgcggtcctgctcgtcgagccgcaccagttcgccgctggccgaggtccgcgcctggcgccgcgagtcgtgcagcaacatcagggcgagcaggccgagggcctcggggtcgggcagcagttcgaccagcaggcggccgacgcggatcgcctcgccgctgagatcggcgcgggtcaggctggtgccggtggaggccgagtagccctcgttgaacaccaggtagatcacttgcaggacgttgcccagccgctcggggagttcctccagggtcggtacctggtagggaatccgggcctcgcggatcttgttcttggcccgcacgatgcgttgggcgatggcgctgggcgcggcgaggaaggcgcgggcgatctcctcggtgcgcaggtcgcagacctcgcgcagggtcagcgccacctgtgcctcgggggtcagcgccgggtggcagcaggtgaagatcaggcgtagccggtcgtcttccaccgcatcgccctcctccggcggcgcctcggcctgctcttccagttgctcggcgagcagccgctgcgaggcgtcgaagcgcgctcgccggcgcaggttgtcgatggccttgaagcgcccagcggaaaccagccaggcgcgcgggttgcgcgggataccgtcgcgcggccactgctcgacggcggcgatgaaggcgtcgtgcaaggcttcctcggccagctcgaaatcgccgagcaggcggatcagggtcgccagcacgcgccgcgactcctcgcggtacagcgcctcgatgcgactgcgcaacggctctccgtgctccctcaatggctggcctgcgcgtggcagcaggcgcttttcggcgcctcgtcgtagcggtcgtggtgacgcagccagtccatgatcgcgtcctcgttgcgccccttgggcgtcaggtcgaggaagttgtaggtggtgagcaggatgtcgaggccgcgcgcataggccgaataggtgtggaacacctcgcccgccggattgcgcaggaacacactggcacccggcatttcctcgccggcgtcgggggtcggctggtagttgtagtcgacgctgccggcggccagttgcgccttgtcgaaggacaccccgaagtcacggttgaaatcgctgccgtacgaggagtaccagtcgaaacgccagcccatgcgccggcggaacgcctggaactcctccaggggcgcgcgcgataccgccaccaggctgacgtcgtggtgcgccaggtgccggttggcgccgtcgatgtggtcggcgaggaacgaacagccgacgcagccttcgctccagcccggcgcgaacatgaagtggtagacgattagctggctattgccgccgaacaactcggccagcgaacgctcgccgcgctcgccctggaagcggtagtccttgtccaccctgacccagggcagttcgcgtcgttcggcggcgacctggtcgcgcaggcgggtgagttgcttttcccgcgccagcagacggcgacgggcgtccagccattgttcccggttgctcaccgggtggtcctgcaaagaaggattcattgccgattctccacggaaattctcggttttccagcctgcccggggtcgttccgccagcggcgccggcgcccggtcgccagggcgaagccggccagcgaagcgccgccggcgcacaccagggacagggatgcgatgcacagggggcacatgcttcacctccggcgccgggcgccctcactcccattccttgaccggtcgcacctcgacgcagccgagccgtcccggcggaatcttcgcggcgatctgcagggcctggttgaggtcgcgcgcctcgatcaggtagaagccgccgagttgctccttggtctcggcgaacggcccgtcggtcatcgccagccgcccgccctggtggcgcagggtggtggcggtctgcaccgactgcagggcgtgcgaggcgatgtagtggccggccttgcccaactggtcggagtaggtcatgcactcgtcgacgatggcggcaagctcctcggccggcacggcggccagcttcgcttcgtcgaaatagatcaggcagaggtatttcatggcggtgggctcctggtgcggatcgacgatccgttcgttcggtagtcgcccggcgagggcgcctttcgacagtggcggggaaaaaagcccgcggcgcggacgaacggtcggcgctcgccgtggaacgccgccgaccgcagcacaagcctagacccgcccgaccaccgggcgcgggccgtcggtcagggctgacgcggtgcgtagggattcaggcggggatcgcgcagcgggctttcccgggtcggcccgggatcgtcctggcgcaggcggagactgccgttgccgatcttcaagccgtccttggtcgtcgcctccccgtcggcgctggccgcgtcgctacccggcaggtccggctcggcggcttccggttgcggctgtggcgcgctgcccatgggcaacggggcgaccggcggcgcggcgggcaacgctgccggcagctcgtccggcaggggcgcggcgagggtcggttggcccaggccggcgagcaccatggccaggagcaggaaaagcacacacgacatgacaaagcctcgataggcctcgggacttccaccatagccgcgcaacggccccggcgagcgaagtacggaccggtggcatcgcgcattggaaaaagggaattcctggaattgttcgataggaccctggccacctccgtcagctgtcaatcgacttttcgaacaacgcgcccgccccctattagaacagcgcaaaaaaactcgatcaaaagtacagcctgggcatgaggtcgcggatataacctgaaatcgaattgcaccccggcgtagttgctccggtaacacttcgcagacgcaggagtcgaacgccaccgaaaagaagatagcacttgccagagaaacttccgcaggtcccaacgaacatcccggcacgcactcgcctcgccatctttcttccattcaaagacccgcccacatgtaaatgagtggagtagccaatgacgctattggatatcgaaaagctgctggacatgactcaccacatgtcggtgcacattcccatcgaactgatcatttcctgggagcagagcgaagaggcctggagtgtgaaagacaactgtctcaacttcgtctatgtcaatcgtcgctataccgaactgatcaccccgcggttcggccagaagaactccctgctgtcccccttcagtgccagcatcgaagagcacgacaagctggtcatccagaccggcaagcgcatcgaggccctggcgctgctcaggccggacgaccatccggcgccctgctgcctgtacttcgagcgcatgccgctgtatgaccggcgcggcaaccgcaccggggtgatcgcccatgccaagaccctgacctcggtcgccccgcgcggcttcatcgccaccgacggcatcggtaccttcaccttcacgcccccctcggagttgttcacctcgcgcgaatgggacgtgatctacctgctgctttccggtctctcggaaaaagaaatagccgaacagatcagccgctccctgagtaccgtcaagtttcacaagagcaacatcttccagaaggtcggttgcagttgcatcggcgccttcaaggcactcgcccggcaaaagaagtggaacttctatatcccgccgaccttcgccagcgccaagtacatcatcaatcactagtcgcgcctcgcgagagccttcggcgtgccgggcgacgcttttgccggcgaaaccgagcggttcgaatggacaaggacaacagcatgtctcgaaacaatccttcgcgtcattcaatactcgtcacttccaacataaacgcggccaatgatgcgaatcgtctttccgagctttgtcgacaactggaaatacgcggctatcggctcttccaggcgccaagccgcaaggtcgccctggattttctcggcaacgccgcgcaccccgccggcatcctcctgctcgtcgcggagccgacaggcgagaacgaggccgcacaattggcggccctcgatgaactccgccaggtcgcgccgtccatcccgctgttcctgttgtttcgtcaactgcgcatcgagcagttgtccagccagctactggacgaggcccagggatgcttcaacctggccgccggccccgcacgcttcatcgccgagcgcatcgacagcgacctgcgcgaatggcgcgccccggcaggccccaggcggctgcgcgactatgccccgccggtcccgcgcacgccggtgagcgcccgctacaacggccgcgcacgcctcgacctggcgccggccaagcagtggcggatcggctcggggagcaccgcggagcgcctggcgacaccgctgaacgacctctccacggcctaccgcaagacgtccgcaggagccccggcggcgcacgccggcgacatcgccgaggcctttcgccgggcgctctgggaggccgccgcgcggctcgccagggaggatggcgatacgtggttcttcgagatactgcggggcaacccggggcctggcatcgaggccggccgggagacgccggcgaagcgctggcacgggctcgccgagacactcgacagcagtcctcggctggacccgctgcgcgtcgccctgagcgcccccggcctcgattcgcgcggtcgcccggccagcttcggagtacccgccgcggtggtctgccgctacctgcgccggcacggcatcgccccgttgcgcaccggcgactatcgcttcctgctgctgtttccccagggcgccagggcggaacacgcgcagccgctggtggacaggctgtgcgaattcaaacgccggcacgacgacgatgcgccgctgaagcaagtgttgccggagttgctcgacagctcgccgctgtaccgctacatcggcctgcgcgaactctgcgcgatgatccacgaagccagcctgcggctgcacctgaccgccctcgccgacgccgccgccagggctgccggccacgccgcgctggcgccggccacggtctatgggcacctggtcagggacgaaaccgaagcggtggcgatcgacaggctcggcggccgtgtggtcgccagcctggtcggcgtccatccggcggccacgccgctgctgttgcccggcgaacgggtggccgaggaatcaccggcgctgatcgactacctgctggccttgcaggccttcggcgagcactttcccggtttcgctcccgagttgcagggcatcgagatcgatgagcgcggccgctaccgggtccgttgcgtcaggccggcagccctcgcccgcggctccggcctgcgcctggccacgcgccggccggactgaggcgcgccgttcagcgcagcgccttgctcaactggccacggtgcttgagttccaggcgctggacgaaggcctggaggatgcgccggtagagttcgtcgccgagctggccgtcctcgacgccggcatcgatattcgggttgtcgttgacctcgatgaccagcaccttgtcgccggcctgcttcaggtccaccccgtagaggccgtcgccgatccgcccggcggcctccagggccagctccagcaccgccggcggcacctgctccagcggcacggcgcggcactcgccgttgacgtcttggccgtcggccttgtggttgtagatctgccagtggccgcgcgacatgaagtactggcaggcgtacagcggttggcggtcgagcacgccgatgcgccagtcgtactcggtgtagaagaactcctgggccagcaacaggaccgagcgctcgaacagctcgctcgccgccgccagcagttcgctgtcgtcgttgaccttgaccacgccacgggagaagcagccatcgggaatcttcagcaccagcgggaagcccaggcgccgggccacccgctgccagtcctgcgggcgttccttgtagaggatctcggtgagcggcatgcccagttgccggcaaccaagcaggtcggccaggtagaccttgttggtgcagcgcaggatcgatgccgggtcgtccatcaccaccaggccttcgcgctcggccttctcggcgaagcgataggtatggtggtcgacccgggtggtctcgcggatcagcagggcgtcgaactcggccaggcgcgcgtagtccttgcgtccgatcagttcgacgtcgatgccgaggctggcgccgacccgtacgaagttggccagcgcctgcgggttggacggcggcagcgcttcgtcgggatcgtggaggatcgccatgtcgtagcgcgccacccgccgcgaacgcggcatgcgccaggcgcgccggctgaaaccgtcgagagcatcggcgaaaacgtcctcctggtcgctgcgcaggcggttcagcacgccagggcgcacgccctcgatatgccagccctgctggcgacggaactccaccagcaggatcggacagggaaaggcttcgaacaactggcgggcgaggtcggccagtggctcgaactcggtatggccgaaatacagggtcagggtgaagccgtcggtggcgccatagggcgtacggcacagcgccttgtccagggccttgtcgaggccacccagggccagcccgtacaccgacttgcgagccagttcgctgatgcagcgcagcgacgggatcacccggtggccacgggcctcggccagcagcgaacagtagtagccgaggccgaggtacttgtagccgcggcacaggttgatcacctgcacgcggcggccgccgtggccgcgcgccgattgctcgaggtattcctgggcggtgagtacttcctcgctgggcaggtaggaggcccagtcctcgcgtcgctcgacgacgatcatcaggcggctgccgagatcggcgagagccggcggtcggggttgctcgacgggggtcatgcggagcgacccgtcgagggtggctaacgaggctgctgacatgagtggcggtatcctctgaatgacggtacctgccgttctagacctgccggcgcctcctgtcgcgcctcgttacgcaagctttacgagcgccgccgccagacgccggcgcggcaaccggccagggccgccgggtaccgcgccgcgagtgccgaggagcatttttacgctggcgttgcgcgctcgtcaggccaggctgtcgagcaccccgccgtcgacccgcagggccgcgccggtggtcgccgaggcctgggtcgagcaggtgtagaccaccaggttggcgacttcctcgggcgtcgccaggcgctggatgatcgaactggaacggtgctgccggacaaaggcggtgccggcctcttctatgctctgcccggccttctgcgcatcctcgcggagcatctcggcgacgccttcggtgagggtcggtccgggcagcaccgcattcaccgtcaccccggtgccggccaggcgcttggccaggccgcgcgacaccgagaggttggcggtcttgctgaagccgtagtggatcatgtccgccgggatgttcaacgccgattccgaagacaggaacaccactcgcccccaaccgcgctcgaccattcccgggacgtaggcgcgggccaggcgcaccccggacatcacgttgacctcgaagaagcggctccactcggcgtcctcgatgtcgaagaagtccttcagctcgaagatgcccaggttgttgaccaggatgtccgccttcggctcggccgcaacgaaagccgcgcagccttccgccgtgcccaggtcgccggcgacgccgcgcaccctggcatccggctggccgttccggatcgccgcgatcgcacggtccaccgccgcctggctgcgtccgttgaccaccacggtggcgccggcggcggcgaggccgctggcgatggcgaagccgatgccggcggtggaaccgctgacgattgccagtttgtcgctcagatcgatctgcatgggagtctcctgtcgagtgacgaaccgctcaggaacgcggctcggggaacagacgacagcctagaccagccagcgttccgtgcccgttcctggcctcagagacgcaggccgaggttgatcatcgccgccgaattgccgagcagcaccagctcgctgcccagcgggccgaagcgaacgcccaccgaggggatgatcgccggcgcgacgccgaagcggttcagcgggatcttgtcgcggtattcgccgcgatagccctgcaacaggccgccggtgagcttcaggtagaccgggtagctgtcactgtcgaaacgcttgcccaggtaggcgtagttggagcgctggctgaacgagttgcggaaggtcgcaccgccggccagcacgccatcggcgcggttgtattcgaggccgagcaggtcctggtgattgttgtgttcagggtccgggttgaaatgccgggtgtagacgctggtctgcaggtaccagaagtcgccgtcgtcggcagcccaggcaggtgcggcgagcacggccagcaggctgaggatgagatagcgcatgtggactccaggcggccgtcgccagggaaggaaggcaagacgtgacggcttgcgcctcgcagcgtgaattctgctgaacccggcctgaatcgggcctgaacgaagcctgaacaatttctgaacgaaccgtcagaaaaccccggaatggctcaagaacggacctcggcgaaacgttcggaaaaccgaacgccatgccccgaaaatattcggaagagcggacgaaaggccatttcggggcattttcatccaaatttaatttcttttactttcaaacggttaggctaaaaaaaaccggatttcataagctggcatgcatcctgccactacactattcggcaagcacgatactctcgtggcttcccccgccggggaaaaccgcgaaacaccctgtcccggagaggccaggcgctcgcggctcaataaaaatcaaaacaagtcgaggaagaaattcatgcgtatcgctcccagtctgctgagcaccgccatcgtggccgctctgttgtccgctccggtcgtcgctgacgagctcaccggcacgctgaagaagatcaaggaaaccggcaccatcaccctcggtcaccgtgacgcttcgattcccttctcctacctcggcaccgagccgggcaagccgatcggctactcccacgacctgcaactgaaagtggtcgaggcggtgaagaaggaactcaacctccccgagctgaaggtccgctataacctggtcacctcgcagacccgcatcccgctggtgcagaacggcaccgtggacatcgagtgcggctccaccaccaacaacgaagagcgccagaagcaggtcgacttctccgtcggcatcttcgaggtcggcacccgcctgctgtcgaagaagaccgccaacatcaaggacttcgacgacctcaagggcaagaacgtggtgaccaccgccggcaccacctccgagcgcctgctgaaggccatgaacgcggacaagaagatgggcatgaacatcatctccgccaaggaccacggcgagtccttcatgatgctcgaatccggccgcgcggtagccttcatgatggacgacgcgctgctctacggcgaaatggccaaggccaagaagccggacgactgggtcgtcggcggcaccccgcagtccttcgagatctacggctgcatggtgcgcaagggcgacgcggcgttcaagaaagtggtcgacaaggccatcaccgatacctacgcctccggcgaggtcaacaagatctacgacaagtggttcacccagccgatcccgccgaagggcctgaacctcaacttccccatgagcgaagagctgaagaagctgatcgccagcccgaccgacaaggccgccgagcagatgtaacgagcgcctggcgttcctcccggagcgccagcgcttcgcgcgtcgcccccgcctcgcggcggggcctcggggacgcgggaggggcctgcccctccccagccgtctcccccggaagagcagcgccgccggcccgcacggccgcgccggcgcctgccttccccgccagtgtctgcaaccgattgaaccgaggggaaaccccaacatgaattacaactgggactggggcgtgttcttcaagtccaccgggatcggcagcgaaacctacctcgactggtacatcgccggtctgggctggaccatcgccatcgccctggtcggctggatcatcgccctggcgctgggctcgctgctcggcgtcatgcgcaccgtgccgaaccgcctggtatcggggatcgccaccgcctacgtggaaatcttccgcaacgtgccgctgctggtgcagctgttcatctggtacttcctggtacccgacctgctgcccgagggcctgcagacctggttcaagcaggacctcaacccgactacctcggcctacctcagcgtggtcgtctgcctcggcctgttcaccgccgcgcgggtctgcgagcaggtgcgcaccggcatccaggcgctgccctacgggcagacctcggcggcccgcgcgatgggcttccgcctgccgcagatctaccgccacgtgctgctgccgcaggccttccggatcatcatcccgccgctgacctcggagttcctcaacatcttcaagaactcctcggtggcgtcgctgatcggcctgatggagctgctggcgcagaccaagcagactgccgagttctccgccaatctgttcgaggccttcaccctggccacgctgatctacttcacgctgaacatgagcctgatgctgatcatgcgcctggtggagagaaaggtcgccgtaccgggcctgatctccgtaggaggtaaatgatggacttcagtggaatcgttcccgccctgccgagcctctgggaaggcatgctgatgaccctcaagctgatggtcctcggcgtcctcggcggcgtcgcgctgggtaccgtgctggcgctgatgcggctgtcgcacagcaagttgctgtcgaacatcgccggcttctacgtcaactacttccgctcgatcccgctgctgctggtgatcacctggttctacttcgcggtgcccttcatcctgcgctggatcaccggcgaggacaccccggtgggggcgttcacctcctgcctggtggccttcatgatgttcgaggcggcctactactgcgagatcgtccgcgccggcatccaggccatcccgaaaggccagatgggcgccgcccaggcactgggcatgacctacgggcagaccatgcgcctggtgatcctgccgcaggcgttccgcaagatgaccccgctgctgctgcaacagagcatcatcctgttccaggacacctcgctggtctataccgtcggcctgatggacttcctcaattcggcccgttcgcgcggcgacatcatcggccaggccaacgagttcctgattttcgccggcctggtctacttcgtcgtaagcttcaccgcctcgttcgccgtcaaacgtctgcagaaaaggttaaccgtatgatttccatcaagaatgtcagcaagtggtatggcgacttccaggtcctgaccgactgctccaccgaggttgcgaaaggcgaagtggtggtggtctgcgggccgtcgggctcgggcaagtcgaccctgatcaagtgcgtcaacgcactggaacccttccagaagggcgacatcgtcgtcgacggcacctccatcgccgatccgaagaccaacctgcccaagctgcgctcgcgggtcggcatggtgttccagcatttcgagctgtttccccacctgagcatcaccgagaacctgaccatcgcgcagatcaaggtactcggccgcagcaaggaagaagccaccaagaagggcctggccctgctcgagcgtgtcggtctcaaggagcacgcgcacaagcaccccggccagctctccggcggccagcagcagcgcgtggcgatcgcccgcgcgctggcgatggacccggtggtgatgctgttcgacgagccgacctcggcgctcgacccggaaatggtcaacgaagtgctcgacgtgatggtccagctggcccacgaaggcatgaccatgatgtgcgtgacccacgagatgggcttcgcgcgcaaggtcgccaaccgggtgatcttcatggaccgcgggcagatcgtggaagactgcgagaaggaggagttcttcggcgacgtcagcgcccgctccgaacgtgcccagcagttcctcgccaagatcctcccgcactgatgtacccgccctcgccggcccgcccggcgggggcctgctccaccctcgcctgcgataacaataaatagggaaagcccatgcaacctgtgctcttcagaaccctgtccctcggcgtcgccattgccgccgcatcctcctcggccttcgccgccacgctcgacggcggcgccgtcgccgcgcccgacgagtacggcgccaaggtcgccgcgcagatcctcaaggccggcggcaacgcggtggacgccgcggtggccaccgccttcaccctggcggtcacctaccccgaggccggcaacatcggcggcggcggcttcatgaccctgtacatggacggcaagccgtacttcctcgactaccgcgaggtggcgccgaaggccgcgagcaagaccatgtacctggacgacaagggcgaggtgatcgagaacctcagcctggtcggcgccaaggccgctggcgtgccgggcaccgtgatgggcctctgggaagcccacaagcggttcggcaagctgccctggagcgagctgctgaccccggccatcggctacgcgcaaaagggcttcaaggtcgccgacaagcagttccagtaccgccaggacgccgtcgccctgttcaacggcaagaccaacttcggcgactacttcggccacatgaaggccggcgaggcgttcctccagccggacctggcgaagaccctggagcgtatcgccgacaagggcccggacgagttctacaaaggccataccgccgacctgctggtggcacagatgcagcaggacaagggactgatcacccaccaggacctcgccgactacaaggtcaggtggcgcgaaccgatgcgcgtcgactggcagggcaacacgctctataccgcgccgctgccaagctccggcgggatcgccctggcccagttgctgggcatcaaggaaaaccgtgccgccgacttcaagggcgtcgagctgaactccgcgcgctacatccacctgctggcggagatcgagaaacgcgtgttcgccgaccgcgccgactacctcggcgacccggacttctccaaggtcccggtggcgcgcctgaccgatccggcatacctgaagcagcgtgccgccgaggtcaatccgacggcgatctcgccgaccgagaaggtccgtcccggcctggagccgcaccagaccacgcacttctccatcgtcgacgccgacggcaacgcggtgagcaacacctacaccctcaactgggacttcggcagcggcgtggtggtcaagggcgctggcttcctgctcaacgacgagatggacgacttcagcgccaaaccgggcgtggccaacgccttcggcgtggtcggcagcgacgccaacgccatcgagccgggcaagcgcatgctctcctcgatgagcccgagcatcgtcacccgcgacggcaaggtcagcctggtggtcggcactcccggcggctcgcggatcttcacctcgatcttccaggtgctgaacaacatctacgacttccacctgccgctggagaaggccgtggccgcgcagcgcgtgcaccaccagttgctgcccaaggacacgatctactacgacgcctacgcgccgctcgccggcaaggtcgccgaggagctgaaggcgatgggctacaccctggaggaccagggctggaacatgggcgatatccaggccatccgcgtcgacggcaaggccctggagaccgcctccgatccccgtggccgcggcgtcggcctggtggtgaaaccctgacaggacggcgggcggcccgccgcccgcgcctgattgcgtgcaacgacgataaccctaccaacctaccgacacgagatatcgccatgaagccattgctccacgcgttcgcccccggtgttatggccctgatgctcctgctgccgcaggccgcccaggccaaggaagtcgcaccgcaacagaaactgtccaacgtggtcatcctggccaccggcggcaccatcgccggcgccggcgccagcgccgccaacagcgccacctacaccgccgccaaggtgccggtcgaccagttgctggccagcgtgccgcagctcaaggacatcgccaacgtccgcggcgaacaggtgttccagatcgcctcggaaagcttcaccaacgagaacctgctggaactgggcaagaccgtcgccaagctggccgatagcgacgacgtcgacggcatcgtgatcacccacggtaccgacaccctggaagagaccgcctacttcctgaccctggtcgagcacaccgagaagcctatcgtggtggtcggctcgatgcgcccgggcaccgcgatgtccgccgacggcatgctcaacctgtacaacgccgtggcggtggccggcgacaagtcggcacgcggcaagggcgtgctgatcaccatgaacgacgagatcctctccggccgcgacgcgagcaagatggtcaacatcaagaccgaagcgttcaagagcccgtggggcccgctgggcatggtggtcgagggcaagagctactggttccgcgcaccggtgaagcggcacacggtgaactccgagttcgacatcaagcagatctccgcgctggctccggtggaaatcgcctacagctacggcaacgtcagcgacaccgcctacaaggccctggcccaggcgggcgccaaggcgatcatccatgccggcaccggcaacggctcggtgcccgcgcgcgtggtgccgaccctgcaggaactgcgcaagcagggcgtgcagatcatccgctcctcgcacgtcaatgccggcggcttcgtcctgcgcaacgccgagcagccggacgacaagaacgactggatcgtcgcccacgacctgaacccgcagaaggcgcgcatcctggccgcggtcgcgatgaccaagacccaggacagcaaggagctgcaacggatcttctgggaatactgagtgaacccttccggcgccgcctgccggccgtgccggaaaaccgcccgctccgccgcccatcgtggcggcgggctggcctagccgcgacgactgtgatggaatcccccgacccgccctgcagcgtacctccgtcactgaccgtgaagccccgcctcgtccgccagttgctgctccccattcccctgctcctgctgatgctcggcttcggctacggcggctaccggatcagcgagagcgccggcatccgtgccctcgccgagaatggcgaacgccagctggagctgcatgcacggacggtcgagagcgagatcagcaagtacacctacctgcccagcctgctggagctggagcgcagcgtcagtcacctgctcaccgacccgacgccataccggcgcaaccaggtcaacgcctacctcgaaggcctcaaccgccgcgccggcagccgcgcggtgtacctgctggacaccaacggccgggtcctggccaccagcaactggagcgacccggacagctacctcggcgaggacctgtcgttccgcgcctactggcaggacgcgatgaagggcaagccgggccgcttctacggcatcggcagcacccgcggcgagccgggctactacctggcccacggcctggtccacggcggtcggatcatcggcgtggcggtggtcaaggtgaagatggacgccctcgaggaacgctgggagaaggcgcgcctggaagccttcgtcagcgacgagaacggcatcatcatcctctccagcaaccccgccctgcgcctgaaggcggtgcgctccctgagcgccgacgacaaggagcgcctggcgcgcagcatgcagtactactggtgggcgctgaacgagtggcaaccgctgcagcgcgagccgctggccgccggtgtggagaagctcagcttccccgccgatgagcagcatccgcgcggcgaagcggtcacctacctggcgcagacccgcgcgctgaacgacacaccgtggaacctgaccctgctcagcccgctggaagacctgcgccgcgacgcggtacgcaacggcatgctggccgccatcggtttcgccctcctggcattcctgctgatcgcctggaacgagcggcgcaaggtactcgccacccgcctcgccgcgcgcgaggcgctgcaacgggccaacggcgagctggaagtgaagatcgccgaacgtaccgccgacctgcaggccagcaacgcacgcctgaccgccgagatccacgagcgccagcaggccgaggacaccctgcgcaaggcccaggacgaactggtccaggccggcaagctggcggtgatcgggcagatgtccaccagcatcgcccacgaactcaaccaaccgctggcggcgctgcgtacgctgtccggcaacaccgtgcgcttcctccagcgcggcaagctggagaccgccagcaccaacctcgccaccatcaacgaactggtcgaccgcatgggccgcatcaccgccagcctgcgtgccttcgcccggcgcagcgacgacgccggccaggccagcctggccaaggcggtggacgcggcgctgctgatcctgcacgggcgcctggagcaggacccgccgaccctgcaccggcatttcgacgacgtgcgcctgggcatcgaccagacccgcctggaacagatcctggtcaacctgctggccaacgccctcgacgccatgagcgggcaggccgaccgccagctctggctggaaggccggcgcgaggaggagcgctacgtcctgcgcgtgcgcgacaacggccccggtatcccgccggcggcgcgcgtccacctgttcgaacccttcttcaccaccaagcccggcgaacatggcctgggcctcggcctgaccctctcggccagcctggccaccgccgccggcggcagcctcagcgtgcagcaccccgaaagcggcggaaccgccttcgagctgagcctgtccctggttcccgattccccgactgcgagtcccgcccgatgaacgagccgctttccgtcctgatcgtcgaagacgatccgcatgtcttgctcggctgccagcaggcgctggagctggaggacatcccctgcatcggcgtcggcagcgccgaggaggcgctgcaacgggtcgaccgcgacttcgccggcatcgtcgtcagcgacatccgcctgcccggcatcgatggcctgaccctgctggagcgtctcaagtccctcgacccgagcctgccggtggtgctgatcaccggtcacggcgacatctccatggcggtacaggcgatgcacgccggcgcctacgacttcatggagaagcccttctctccggaacgcctggtcgaggtcgcccgccgcgccctggagcagcgcgggctggcccgcgaggtcagcgcgctgcgtcgccagttggccggccgccaggacctggcgcaacggatcatcggccgctcgccggcgatccaggcgttgcgcgagctgatcgccaacgtcggcgacacctcggccaacgtgctgatcctcggcgagaccggcaccggcaaggagctggtggcgcgttgcctccacgactatagccggcgccaccagcatgccttcgtcgcgctgaactgcggcggcctgccggagaacctgttcgacagcgagatattcggccacgaggcgcacgccttcaccggtgccaacaagcggcggatcggcaagatcgagcatgccaacggcggcacgctgttcctcgacgagatcgagagcatgccggtcaacctgcagatcaagctgctgcgggtgttgcaggaacacaccctggaacgcctcggctcgaaccagtcgatcccggtggactgccgggtgatcgcggcgaccaaggcagacctcgccgccatgggcaagagcggccagttccgcagcgacctctactaccggctcaacgtggtgagcctggaactgccggcgctgcgcgaccgccgcgaggacatcctgctgctcttcgaacacttcctccagcagtcctcgctgcgcttcgaccgccccgcgccggaactcgaccgtgccaccgtggccagcctgatggcccacgactggccgggcaatgtacgcgaactgcgcaacgtcgccgaacgcttcgccctcggcctgccggtgttcaacaagggcggccaggccgtacagaccggcggcccgcgcttcgccgaagcggtggaggcattcgagaaggccctgctcggcgacgccctggcccgccaccacggcaacctgacccaggccagccaggacctgggcatggccaagaccacgctgttcgacaaggtgaagaagtacggcctgcaataggccggagcgccctcttcgccctgcccgcctggcgcagggcgcgatgcttcatccgacatttctcacccgcctgcgattccgctcggcggataacgccgggggcgttattcgccctacccgcctgacgcagcgcgtcataggccattcctcctccctcggtgcgccctacccgccggtgtggggaacgcgctatccgggcattcatgaattgaactcaagtgtcattttccccggcagcggtttttcgcacgaatcgttccgccaataatgcgcccaccttcttccagtacgccgcgccgcggccggcctcacgagcgagatcgccatcatgctgttcagcccctatgcccttggccacctgaccctccccaatcgcatcgtcatgccgccgatgacccgttcccgcgccgccagtggcgaagtcgccaccgcgctgatggccgagtactacagccagcgcgccggcgccggcctgattgtttccgaaggcacccagatcagccggcagggccagggctacgcctggacaccgggcatccacagcgccgagcaggtcgccggctggcgccaggtcaccgacgcggtgcacgccgccggcgggcgcatcttcgcccagctctggcacgtcggcagggtctcgcacacctcgctgcaaccgggcaacgccgccccggtgtcctcctcggcgctggtggccgaaggcgtgaaggtcttcgtcgatccccagggccgcggagcgcaggccggcggcggcgagatggtccagcactcggcgccgcgcgcactggccgtggaggaaatccgggagatcgtcgccgactatgcccaggccgcacgcaacgccctcgacgccggcttcgacggggtcgaactgcacggcgccaacggctacctgatcaaccagttcatcgactcccaggccaatgcgcgcaacgaccaatacggcggctcgctggagaaccgcctgcgcttcctccgcgaagtcgccgaggcggtcaccgcggtggtcggcagggagcgcatcggcgtgcgcctggcgccgctgaccaccctgcagggcgcggtcgacgacaccccgcaagccacctacctggccgcggcgcggctactggacgagatcggcgtggcctacatccacatcgccgaggccgactgggaagacgccccggccatgccggcggcgttcaaggaagcgttgcgcatcgtctaccgtggcagcctgatctactccggcatgtacaccaaggcgcgcgccgaggaagccctggccaggggctgggccgacctgatcggcttcggccggccgttcatcgccaaccctgacctgccctaccgcctggagcacgacctggcgctggccgacggcgaccgctcgacctacttcggtggcggcgccgccggctacaccgactacccgagcctgccgcaggcggccggttgaaacccctagccgaccggaccgcgagcgcgcggccggttggcgaaacatgccgccacaacctcgcctttggtcgactagaacccacggctggcgggacctagactcaattcgccagatattcattattaataggcctgatttcctggacaggggggaccaccgatagcatcgaggaacatttcgaggaatccgccatgagcaagtccctgatcgtctccctggccgccagcctggtcgtcctggccggttgcgccaacccgccgcgcagcgtcgaacgcccctacagcgacgccgaaatcaagtcctacgccctcgacagcctggaacgcagcgacctctcgccgaagcgcctcgaccagtaccgcagcgtgctcggcacgccgcaccggcagaccctgtagcgccttcagacggggcgccgccagacgctcgccagccagggctgctgctcgcgcggcaggcccggcggccggtagtagtgctccagctcgacgaaaccggcttcctccagcaggcgtttccaggccgggtaatcgtggtaggcaccgtagcgttggccattccagccctcgcggttgtcgccgcgcgggttggagctgaacagcacgccgcccggccgcagcgcttcgaagagttcgccgagcacccgcggcaaggcgctgccgggcacatggaacaggctggcgttggcgaagatgccgtcgaagtgcccggccggcagtcgcagcgccaggaaattctgttgccatacctcgcaaccgctgtcggccctggccatctcgacgaagcgcggcgtgccttcgagtcccaccggctggtggccgaggcggcggaaggtggccaggtcgcgcccgggaccgcagccgaaatcgaggatccggtacggcggcgacccgtcgatatggcgcagcagcgcctcgacgttctggctcacgtcatggccgcgggtgccctcgcggaagccttcggcgttgcgctggtagtcggccagggtggtggcggtgatcgcgtcgaaatcctcggtgctcatgtctgctcgcagtggcggggttccgcccagtctagcgccggcacgggtttcgcctaaggttttgtaatagtttcccgctgtggcgagggcccgcgacacagtaggatcgacttccctttgactctcaatggccatcatgaccaccctttcggagccccccagtcgtccttccggacaaccctccccgcttcgccttcgccacctgcgtccgcccctcgacgccgaatccctcgcctcgtccccctccgtcaccgccggctgccgcagccgcgccgtgcagcgtcgcgccagcgcgacggccagccggaccgggaggtaagcgcacatggaatggatagctgacccgactgcctggctcggcctggcgaccctgatcgtgctggagatcgtcctcggcatcgacaacctggtgttcatcgcgatcctcgccgacaagctgccgccgcacctgcgcgaccgcgcccgggtcctcggcctgtcgctggcgctgctgatgcgcctgggcctgctggcgagcatctcgtggatggtgaccctcaccgagccgctgttcgaggtattcggcaagagcttctccggccgcgacctgatcatgctgttcggtggcgtgttcctgctgttcaaggccaccatggagctgcacgaacgcctcgaaggccatgtcgcccagcacgccggcaacaagacctacgcgctgttctggccgatcgtcgcgcagatcgtggtgctcgacgcggtgttctcgctcgacgcggtgatcaccgcggtgggcatggtcgagcacctggaagtgatgatgatcgcggtgatcgtctccatcggcctgatgatcgtcgccagcaagccgctgacccgcttcgtcaatcgtcacccgacggtgatcatgctgtgcctgggcttcctgatgatgatcggcttcagcctgaccgccgagggcctgggcttccatatcccgaaaggctacctgtacgcggccatcggcttctcgatcctcatcgaggtgttcaaccaggtcgcccgcaagcgccgcaagaagagcctgcagggccaccgcccgctgcgcgcgcgtaccgcccatgcggtgctgcgcctgctcggcggccagcgcctggaggccgacgaggtcggcgaggaagtcgccgacctgttcgaggagggcgacgaccaggtggtcttcgaccgccgcgagcgggtgatgatcagcggcgtgctgcaattggccgagaagcccatccgcagcctgatgacggtacgcgccgaggtcgactgcatcgacctcgacagcggccgcgaggcgatccgcgcggcgctgctcgaatcgtcctactcgcgcctgccgctggtgcgcgacgggcgcgtcgaggagccgctgggctacgtgcacaagaaggaactgctcaaggagctgctcgccggcgcccagccggacctggaaagcctggcccgccagccgctcaacctgttgcaggactgctcgatcctcaacgccctggagcagatgcgcgaggcctcgacccacgtggccttcgtggtcaacgagttcggcgagttcatcggcctgctgaccctgaccgacattctcgaatccatcgccggcgagctgcccgacgccagtgagatcgacggtccggacgtggtcgaggagaacgacggctatctggtcagcggtgccatgaacctcagccaggtgcgtcgacgcgtggggttcgacgcgcgcgccacggaggactaccagaccctcgccgggctagtgatgagcctgctcgaccgcctgccggtgatcggcgaccgcctgcagtggcaggactgggaactgcgggtggtggaagtggaagaacgccgggtgacccgggtcctgctgcgcaggggctgagcgaagcggcggccgccgatccggccgccgtcctccccggcgcagcggcagaccgctacaggcggcgctgccagacctgcgcctgctcgtccttcaccacctcgacgaaagcttccggcaacagggtgcggaacgggccttcgtcagcctcggccagctcgaccatccgcgcgatcatttcctccggatcgtactgctcgaagggaaagcgcacgccgctgtggtcggtgaagtggcgctgcgggtcgtaccagcgtttccaggtttccatcatgcgatcgttgaagccggtctggtacgggccgggattgatggtgccaacctggatgccgaacggcttcagttcggcatgcagggcctcggcgaaggactccagggcatgcttggaggcgcagtaggggccggtatagggtccggtgatcaggccggcgatggacgacacgaagagcaccttgccgccacgcttctgctcgaccatgcgccggacgaaaccctgggtcagttccaggttggcgaacacgttggtctcgaacagcgcgcgcaccagttccagcgggatctccgcgctggccccggcctcggcgctgccggcgttgttcagcagcacgtcgatatcccattcccaggcgcgttcgcgatcggcggcgacggtgatgtcgagggtttccacccgcagcggaacgccacgccgcccggcctcttcgcgcaggtcggcggcctgcccggcgccgcgcacgccggcgatcgtccgatggccgcgggcggccaggcgcaacgccacttcccgaccgaagccgctgccggccccggtcaccaggattcgcttctgtttcatctcgattacctctggattgttgccatggccacggcggcctcggcgatggattggtcctgggccgcgctggcgccggagacgccgacgccacccaggcaggaaccgccggcatcgcccagcggcatgccgccggcgaagcaggccagcccgccgttgctctgctcgatgctccacaacggctggcccggcccggcgagtcggcccagctcgccgctgggcaggcggaacagcgcggcgctgcgcgccttgcgctgggccaggtcgatggcaccgggaacgctatcgtccatccgtacgaacgccagcaggttggcatgggcgtcgaccaccgcgacgcagaccgccaggcgctgccgctgcgcttcggcaatggccgccgcgatgcagcgttgggcatgttgcagagacaggtgggtagacatggccggcgtcctcatcgagtgcttgcgggccagtctagaaaggtcgaagctttaacagaaccggccttctcctacgtagactttcaagtttttctaacaatgaatcgacgcgatcccctcgccggcctgcatgtcttcaggcaggtcgccgacaccggcagcttcacccgcgccgccgccctgctcggggtgacgccggcagcggtgagccaggcgatcaaccaactggaagccgagctgcgtctcaagctgttccaccgcaccacccgcggggtcagcctgagcgaggccgggcagcgctaccacgaacagaccgaacagccctaccgcgacctggtgcgcgcccgcgaagcgctaggcgaaagcctcgcggaaccctccgggcagctgcgcatcagcgccctgcacctggcgaagaacctggtgatcgcaccgatgctcaacgagttcgtgcgacgctacccgaaggtacaactggagatccgctacgaggaccagttggtggatatcgtcagggaacgactggatgccggcatccgcctggccgacgccctgcagccgggcatggtcggggtgcaactgacagcgccgctggcgtgcctgctggtggccactccggcctacctcgccgagtacggtacaccggccagcgtcgccgacctcgatgggcatgccgccgtgcgcttccgtttcccgcgcagcggccgcctgcacaagtggcgcttgcgggaagacgggcgggaactggaagtggacctgccggcacgcttcgtcagcaccgacaccgaggcgatcatcgaggcggcccgcgccggcgcagggatcgcccaggcattcatccgcgagcgagtcgccgcggacctcgctgccgggcgcctggtggaagtgctgcctggcagttgcctgccgctgccgccgatgtggctgtattacctgaaccgccgccacgtaccggccaagctgcgcgccttcatcgaactgctacgcgagtggcggcagccggcctgaacctcagcggcccttgccggccggccccggccggctcagcaggaggtcgtccggtccgtcgatctcgatgaagcgaccgctttccagcgcctcctccagcggcgtgccggcgagcacgtcggccttgcgcagggcgctggagaaacgcaggtcggcgctggcctcgaccttcgccaacggcacctggtaggtcttgaacgcaccgtagcggaagccttcgctgggcatcatcccttcctgccccagcaggtaggcggacactcccagttcgccgctgtcggcgtcgatcatcgccaccaccttccagaactccagcggcacctgcacgccctggtagagcggatcgtcgtcgcggaacaccgggccggtgaacaccgagatgcggaagccctcgctcctggcgttctgcagcacgtagtcctccagcgacagccagctgcgctggttgagctgcgccacctggggcaccgcgttggtgtagacgaaggtgtcgtcctcagcctgccgggcgacggcatcgctgtcgccccagccgggatcctcgcgacgcaccatgtggcccttgtcgaacgaagccgggccgtagaagtccttgtgtccgacctgcgcggccgcctcgatgcgcgggtcgaagccccaggaatccttgcgcttgagcgaacgcttgagcgcgccgtcgatattcaccgcggtgaggatcggcaagcgccggctggcgctcatcaccaccgagaaatgcagatagtccaggcgcgtgcccttgcccaccggcagcacctggtggctcttgcccggcttgggcaaggccgccttcggcccgaggaaggcctcgtcgaaacccttgcgctcggccaggtcggcgacgctgcgctgcttttcctggaagcgcggcacgccgcgcttcagctccgccccggccaccggcacccaggcgcgacgcgccagcaggctgcggatcacgctggccttcaccgcatagttggtcttgcggaactggccgccgaagtgcaggccgaccacctcgccgccgtcgatcgaaagcaccgccgagccggaattgccgcccagggtcgagcagtcgtgggtcaggtaccaggcgtcatggggcaatcccacgacttcgccgggagcgaagcgcttgacgtcgtagatgttgccgaagatatcttccatcgccccggcgtcgttgcggctgtcgcgcgccggatagccgaccaccgccaccgcctggcgcggctcggcatcctggcgcgcgaggaccagcggcggcggcagcaggtcgcccttcactacctggaggatcgccatgtccggcgcctcggagacgtccggggcgatccacaggacccgcgcgatcacatgctcgtcgctttccggctggcggtattcctcgcggaagtccacgcgggtgcgcacctgcttgccggcctggttgagacggaagcggaacaggctgccctggcgctcggcgaacaggctggcgacatgccggttggtgacgatcaggtcgtcctcgatgcgccagccggtaccgcaccagtccatgctgtcgtggtcgatcagttccagccgaccgaccgagcggatcggcgtggccagcgcggcgcgatgcttcttcaggcgctgctccaggccggccagcggcgcttcgtcgaagataccgttcttcaccagcagcaccggccggctcttgagcaggacgatcgcctcgctgaagcgccgcgagtcgaagaacgaggcgtcggattccggcgacacgctcttgcccaggtggtcggcgatctgctcgcggctggcgttgtacgccggcacgttgctccactcaccgcgggcggcgaggtgggcgagttcctcgcgggtgcccttttccttcagtaccgagcagacccgcagttcttccggcgtggcccgccgggggttgcgcttgcgcatggccatgtccctcgctgggcggatatccctggcaggagtctagccgagggacatgacagggccatgtcccgctggcgcaccgccgcgcagctcaaccggcgaacagccggtaggccgggttgtgggtttcctcccagtacggatagccgatggcttgcaacgccgcctccagctcgccgcgctcctcgtccggcacctgcaatccggccagcacccgaccgtcggcggcgccgtggttgcggtagtggaacaggctgatgttccagcgcgagccgagcttgtcgaggaagttcagcaaggccccggggcgttcgggaaactcgaagcggaacagccgctcgcggcgcacctcggtaccgtggccgccgaccatgtggcggatgtgcagcttggccatctcgttgtcggtcaggtcgagtaccgggaagccctgctcgcgcaggccggcgagcaggtcggcgcggctgtcggtgagcggatgggtctgcacgccgacgaacaggtgggcctggcggtcgctgtggtagcggtagttgaactcggtgatctggcgccggcccagcgccgcgcagaaggccttgaagctgcccggccgctcggccacggtgacggcgatgatcgcttcgcgctgttcgcccagttcggcgcgctcggcaacgtggcgcaggcggtcgaagttgatgttggcaccggagtcgatggccaccagggtctgcccctcggtgcgttcgcgggccacgtacttcttgatccccgctacggccagggcgccggccggctcggtgatcgaacgggtgtcgtcgtagatgtccttgatcgccgcgcagatttcgtcgctgccgacggtgatcacctcgtcgacatggtccttgcagacctcgaagttgcaagcgccgatctgcgccaccgccaccccgtcggcgaacagcccgacctggcccagcaccacccgttcgccggcggccagcgccgcctgcaggcagttggaatcctccggctcgacgccgatcacgcgaatatccggacgcaggtgcttgacgtaggcggcgatcccggcgatcaggctgccgccgccgaccggcacgaagatcgcgtcgaggcggccgctgtgctggcggaggatctccatcgccaccgtgccctgtccggcgatcacgtccggatcgtcgtagggtgggacgaaggtcatgccttcgcgctcggccagttgcagggcatgggccagcgcatcggggaaggcgtcgccgtgcagcaacgcctcgccgccgcgcgccagcacgcccttgaccttgagctcgggagtggtgcgcggcatcacgatcaccgcccgcacgcccaggcgctgcgccgccagggccaggccctgggcatggttgccggcggaggcggtgatcaccccgcgagccttctgctcgtcgctcaggcgcgcgacacgggtgtaggcgccgcggatcttgaaggagaacaccggctgcaggtcctcgcgcttgagcagcacccggttgcccaggcgctgggacaactgcggcgcgacctgcaagggggtttccacggcgacgtcgtacaccggcgcggccaggatgctttccacgtagccggccagcaggggtttgcttgcgctgagggtcgaggcgctcatcggctggcctccgcgctcgccgccaccgaggccagcaggtcggtgccgtaggagttgtccaccgcgcagcgccactggccatcggcctcctggcggaacacgtaggtggcccgacgttgcaggcgtccggccttcgactcgatcaccgcctcggccatgaccagcgccgtatctcccgcctcgatcacccgtaggtcgtgctggcgcactcgcaggctgtgctcgaagtgccgggcgatggcgtcgaacgcctggcggatctgcgccttgccgcaggcgttgaggcccggcttgaccaccagggtggcgtcgtcgcagtagaaatccatcagggcatcgaactgcccggcattgatcagggcgtcggcccggccaacgaggttctggagggtctggtgctgcatgctgttctcccggttcggtggttttggcccaggagacagaacgaagaacccgcctcgagggcgggttcggagtggacgctggctaacccgccatagctggaatggcggtaataatgctgcggcgggtaagcagggtcgcgaaggtcatgggtatcgaaactacggcgcaggcccgttggctgtcaagcggtccggccgcgccggcaggaaaaagcccctgccgcgatggcaggggcttgccgttttggccgaacaccgccggaggtcagcgggtcagcagcaccttctgcggctgcgagccgctcacggtgaccagcttggtgacggtgccgccctcggtgatggtcttgccatcgctctgggcgctccaagtcagctcgctggaaatgtagtaggtgccgttggggatgtggtcgaagtcgaagcgaccgttctggtcggtggtcgcctcgcgcacgtaggtggcgcgtcgcgggtcgagcaccggcggttgcacgtcgggatcgcgcttggcggcatcgaggttgccgaacttcgcgtagtaggccttcatgtagctggtcgcaggctccagggtgaccttggtgttggtccccttctggatcgcacccgacgcactggtcaggtacaggtcgccgttgatcacgccctcgcccacctgctgggtcgccgcgtattcatgctccgggaaatccggcaggtcgttggggttggaggcgcaggccgccagggccgcggtcatggccaggaggccgaggttcttcttgatcgaaagcatgggcaattccttttttcaagcgaaggtaacgagtccgttgtgcggcaccgaccgcgtgctcaggagcgacgcccgagcaggaagccggcgagcaggcccaccgcggtggtgatggccacggtctgccagggattggcgccgatatagctttccgtcgcatccaccgcgtggcggctgcgttcggccacggcgctaccgcccttgccgagggcatcgttggccttctccagcagcgcgccgatccgcgcacgggcgctatcggccttgtcgccggcgaaggcggcgctgtcggcgagcatgctgttggcttcggagagcagttcctgcagctcgctgtagctctggtgctggatctgctcgaggttgtctttcactgcgttcttgcgtgccatcgaagaggctccctgaaaaatgacttgcaaaggagttgataggcgccgcagtgaaaaagttcagaggaaatcgccgggaagaaccgacgcccaggcagtgggcgccggcttccgtggcctgcctgccgtcagaacgcgtagatcgccgaaagaatcgccgtgcgaccgtcgccgtactcgatggccgaggagcgcgactggttgccgtacacctggcgcacccgctcgacgtaggccttgtcgaacaggttgtcgaggttgagttgcagtttcaggtcgcgcgtcgcctggtagccgagcatcatgttgtgcacccagtaggcatccagcttgccgttgtccaccgaggtgacgttgcgctggctgacgtagcgtgcgccatagcccagggtcacgccctcgggcagttcgtaggtgctccagaggctcaacgagcgcggcggggtattgcccagggcctgtccctcacgctgcgggttgctggatttcagggtttcgctgtcgaggtaggtgtaggtggcgaagaggtcccagtgctcgttcagcttgccgctggcgctcagctccaggccacgcacgcgctgttcgccggcaagcacgtagctgccgtcggccaggcgttcgcgagcgtcctccttcttcacctggaacagcgccgcgtccagctccaggcgccgtccgaggaactcccacttggtgcccagctcgtaggtgctgttcttctccggcgccaggcctccggtcgcctcggtcacgcccgagccggtggtgaccaggtgttccgccgaggggttgaaggaggtgccgtaggagaagtacacccgcccgttctccagcggcttgaataccagccccgcccgtgtgctcagcttgccgtcggaactgtcggcgcgcaccgtcggcttgcctgagggcgtgctccgcgaggtgccgtcgatccagtcgtagcgcaggcccaggctgaggtcccagcgctcgtccagggcgatggtgtcgaaggcgtacagcgccttgacctccagttcggtccggttgcgcgcgctgtcgcgcttgtcggtggggccgttccagtagcccggcgggttgtgcaggtcgaagccgttggccgggtagaacttgcccaggttgtaggagtaggtggtgcggtcgtaggtctcgcgggacagctcgaagccgccgatcagcgtatgcgccaggccgaaggtgtcgaagcggccggtgaggttggtctggttgatccacatccgcgtcttcgaatcgcgcccataggcttgcggtcccgccggcaggtagcgacccggcggcaggcccttctggttgacgtgggaggcggagatcaccgtgtcccgatgcaggtgggaatagcggatgaggttctgcaactggaagtcgtcgctgaaatcgtgttcgagcttgagggtggcgacgtcgttgtcgatccgttcctcgtccaggttgcgccagccaaaataatcgtggcggctgacgccgtccagcttgcgcccgttcagcgccggcacgccatagtcgggaaggttgtcgtcgcgctggtggaagtagctcagggtcaggcgggtcggggtgtccaggccgaaggtcagggatggcgcgatgccccagcgctgcttgtcgatctgttcgcgcccggcgacgtcgttgtggtgggccatgaggttgaggcggaaggcggtcgattcgccaagcccttccagcggctggttggtgtccagggtcaggcgccggtagcggtccgtgcccagtccggcgcccaggtgggtgaaggcttcggccttgggctgcttgctgaccatgttgatgctgccgccgctggtgccggcgccgccgaacaccgagttcggtcccttgatcacttccaccgcctccaggttgaacaggtcgctgcggctggtctgggcgctgtcgcgcagcccgtccacctgcatgttggcgttggcgctgaagccgcggatgttgatgctgtcgccggaaccgccgccgccctcgccggcgttgaaggtgatgccggagacgttggacagcacctggcgcaggctcagggcgttctgctcctggatcaccttttgcggcaccaccgtgacggtctgcggggtatccagcagcggcacggcgtacttggccgaggccgagcgttcgaccctggacgacgcctgctcgccggtgaccgtgtcggctcccagttccaggggatcgtccttgcgcgccgcgtcctcggccagggccggcgaggagcaggcggccatcaacagcatcagcggcgccagcgggcgtttggtgggcaagggggacggctcgttgcgacgatccatgaagtactccatcttggttattgagaatcattggcatttgattgatggagggtttttttcacaagccggacagctccgaaaaagctcccggaaaaatctgataaccaacggcagagtcccggaacagagggctcgccgcgcggcccttctgccaggcggcgaccgcatccctgccatcgcgcagacaaaaaaaagccccgccaatcgaccggcggggctttccctaaagcgtgtcgcctcagaacagcgaggcgaccagatgggtggcgggcgccacctggaagtcgatggacatcatcacgctcagcgcggtgatggcgacgatggagaaggcgaacagcttgcgcgcccagacccggtcgtcggcggtccagtagccggtcagggcgatggccagccaccacaggctcaccgccaccgccaccagcaggtagccgtagccggcgtagccgcccaggcacaaggcgagggtcgccgccatgaaggcgaggatgtagagcacgatgtggatcttggtcaccgcgatgccgcgcgccaccggcagcaccgggatgccagccgcctcgtagtccttcaggcggaagatggcgatggcataggagtgcggcatctgccacaggcagaagatcgccagcagcgaggcggcgccggcgtcgaactggccgctcaccgcgcagtagccgaccaccggcggcatcgccccggagaggctgccgaccagcgtgccgtactgcgaacgacgcttgaaccacaggctgtacaggccgacgtagacgaagtagccgaagccggccagcgcggtggtcagcgggttggtccgccaccacagcaggccgaagccggcgaccccgaggaccaggccgtgggccagggcagccttcagcgagatctgcccggtcacggtgacccgcccgcgggtccgctccatgtgccggtcgatgtcgcggtcgatgcagttgttcagcacgcacccactggcgaccaccagcgacaggccgatgaccgtggccagcaacagcatcggctcgacgctgccgcgggcggcgaggaagtatccccccgccaccgcgatcaggttgccgaagatgattcccggcttggccaccaggagatagcgtttcagcttcacgtcatggccctcagggcatcggcatcatcagcatgtcggcgctgaagatgatccacagcgagagaccgaccaccagcaggatgacgatcaccgtgaagatgaacgccatcacgttccagcgcccttccgacgacatgttcatgtgcaggaagcagatcaggtgcaccaccacctgcaccaggccgaggacgaccatggtgaggatggtcgcgtggcgcgagaagccgccgtccatgaccatgtagaacgggatcgcggtgaggatcaccgagagcacgaagccgatcgcgtaggaacccaggctgccgtggccggcgccgtggttgtcgtgtgcagcgctgctcattacagggcccccatcaggtagacgacggtgaagacgcagatccagacgatgtcgaggaagtgccagaacaggctcaggcacatcatccgggtgttgttctgcgcggtgaggccgcgggtccagatctgcgccatcagcaccagcatccacagcagaccggcgctgacgtgcaggccgtgcatgccgaccagggtgaagaaggacgacaggaaggcgctgcggctcgggccgaaaccttcggcgatcaggtggtggaactcgttgatctccatcccgatgaacgcggcgccgagcaggaaggtgaccccgagccaggcgatcgcctggcccttggcgcccttgtgcgcagagagcatggccaggccgtaggtgcagctggaaaccagcaggatggcggtttccaccagcacgtagggcagctcgaagatgtccttgccgctggggccgccggcggtgtggtgaaccagcaccgcgtaggtggcgaagacgctggcgaacagcacgcagtcggtcatcaggtagagccagaaaccgaatacggtgttgccgccgctatcgtgtgcatgatcgtggtcgtggcccacttcgtgggcgtcggccagatgcttgttcaatactgccgtcgacatggttcagacctgcttggcgagttgctggaaacgggcgctttcgatcttctcgatctcttcgggctggacgtagtagtcgacgtcctggttgtagctgcgcacgatgaaggagccgatcatgccgacgaagccgaccgccatgagccaccagatatgccagatggcggcgaagccgaagacgaaggcgaacacggcgatggagaagcccgcggcggtgttcttcggcatgtggatcggctggtaggccggcagcttgcggtaggcggtgccggccttcttcatgtcgtggaaggcatccacgtcctgtaccttcggcagctcggcgaagttgtagaacggcggcggcgaggaagtggcccattccagggtgcggccttcccacgggtcgccattgacgtcggccagttgcttgcggttgcggaccgagacgaacagctggatcagttggcaggcgatgccgcagaagatcagcacggcgccgaagaacgcgaccaccaggtagggcttccacagcgggttgtcgtagtggttcaggcgacgggtcatgcccatgaagccgaggatgtagagcggcatgaaggccatgtagaagcccaccagccagcaccagaaggaacgcttgccccacttctcgtcgagggtgaagccgaacgctttcgggaaccagaaggcgaagccggccaggtagccgaataccgcgccgccgatgatggtgttgtggaagtgggcgatcaggaacaggctgttgtgcagcaggaagtccgcgcccgggatggccagcaggacgccggtcatgccgccgatggtgaaggtcaccatgaagcccagggtccacaggatcggcgtgctgaagcgcaggcggcccttgtagatggtgaacagccagttgaacagcttcaccccggtggggatcgagatcagcatggtggccacgccgaagaagccgttgacgtcaccgcccgaacccatggtgaagaagtggtgcagccacacggtgaagccgaggaaggtgatcgcggcgctggcccagaccatcgacttgtagccgaacatgcgcttgccggcgaaggtcgcggtgacctcggagaagataccgaaggccggcaggatcaggatgtacacctcgggatggccccaggcccagaagaggttgatgtacatcatggcgttgccgccgagctcgttggtgaagaagtgcatgtccaggtagcggtcgagcgacagcaggcccagcgcagcggtgaggatcgggaacgaggcgacgatcaggatgttggcgaaggtgcaggtccaggtgaagatcggcatctgcatcagcttcatgcccggggcacgcatcttgaacacggtgaccaggaagttgatccccgtgagcaacgtgcccatcccggatatctgtagcgcccagatgtagtagtccacccctaccccggggctataggccagctccgacagcggcggataggccacccagccggtacgggcgaattcgcccaggcccagcgacacgttgaccagcatggcgctgaccacgagcagccagaagctcagcgagttgaggaaggggaacgccacgtcgcgcgcgccgatctgcagcggcacggccaggttcatcaggccggtcatgaacggcatggccatgaagatgatcatgatcacgccatgcgcggtgaagatctggtcgtagtgctccggcggcaggtagccgtggttggcgccttcggccagggccaactggccgcgcatcatgatcgcgtcggcgaagccgcggaccagcatgaccagggcgacgacgatgtacatcacgccgatcttcttgtggtcgaccgaggtcagccactcggtccacaggtaggtccacttgcggtagtaggtgatcgcaccgaccacgccgaggcccagcagggcgacgacggccagtgtgaccatgacgatgggctcgtggtaaggcacggccgagagtgtcagtttcccgaacatctgcgcttactcctgggtactcggttgcatgtgcatgtccttcatgtctttcatgccctgcatggcttgcatgtccatgtcctgcatgtcgtgaccggtcatggcggcttcgtgctcagccccggcgtgctcgccgtgcgcggcacccttggcgtcgccgtggtgctcgtacttggtgaggatgtggccgaacagttccgggctgaccgaagagaagtaggtcggcggaacgttctcgctcggcttgaccagttccggataggtgccgatcgacaggctggccggtgccgccttgaccttggcgacccagtcctggaagccctgctcggaggtggcgatggccttgaagcgcatgccggagaaaccgccgccgctgtagttcgcggagataccgtcgaatacgccttcttcgttggcgatcaggtgcagcttggtcatcatcccggccatcgagtagatctggctgcccagctgcgggatgaagaacgagttcatcaccgaatccgaggtgatctggaaattcaccggggtgtctttcgggaaggcgatctcgttgaccgtggcgataccctgctccgggtagatgaacaaccacttccagtccagcgaaacggcctggatggtgaccggcttgacctcggagtccagcggacggtacgggtcgagcttgtgggtgctttcccaggtgatccagccgaggatcgcgatgatcacgcagggcaccagccagaccaccgcctcgatgcggttggagtggtgccagtccggcttgtactcggcctgggtgttcgaggcgcggtacttccaggcgaacgccagggtcatcacgatcaccgggatgaccacgatcagcatcagcagggtcgcggtaatgatcagggtgcgctcgtccatgcccacctgccctttcgggttgaacagggtcatgtcgcagccgccgagcagcagcgcgggcgccagggaaagccatttcaatgcggcaaacgggtttgctttggtcatcttccggccttaatcgatggaaggagcgagtggtcgctcatggatgtctccttgcaaggcttgtggcggagaccgctggcttcagccagttccagacatgcagtcgccgccggggtacggaacggccattgcccggccacgggagaaggcaagcggatacctttcccgattccggtggcggactcgttccacgcgctgagtcgttccttgatgaacagcgttttcgaagctgtgccggaagaggccaagggcggccaaggcacgtgcatgcctgggcgagaaggattgcccttcccgccgggtgatcaggtcgcagttatcggtcggctatttgttgtgcaacaggcaaggcaggaacccatttatcgcgatgcggagcagagactcgcgcgacgctcgttggaccgaaactgagcgtcagttattacaattcatttcagctgaggagcctatgacacatcttgcaatagactttctcaaacatagataaagtagggcttttacctgcctgcgacaggttgtcgcaggccataccctagcacaacagttggaatacgcgaatattcttcgcttcgagcagcataacgcaaggaaatcgcccccacgccagcatcgtgacccgagagtcagtgtctatcggcctgcaactgtacccctgccgttcgtccagatgcgccaactgtatccgccgccgggccggcgctaacgcgcaggcgccagagcagcgcggcggccagcagggcgctggctccggccaccagcatagccagacggaagccctcggccagcgcggccggcagctcggcgtcgagccccgccagggaaccaggcaagcgatgggccgtgatcgcctgggtggcgagccgttgcgcatcggcaatccccagctcctccagccgatcgcccaggacgacgatcgcccgcccgctcagcagcgctcccagcaacgcgatgccgacggccatgccggcctggcgcagggtattcatggtcgccgaggccatcccggaacgctcgcgggccacgctcgccatgaccgccagaccggtgccgggaacggccaggcccatgcccaggccgagcgccaccagcaacaggccgacccagggatacgcggttcccgtaccgcaagcggccagcgccagcatggccaggccgatcaccaggtagcccagcaccagcaggcgtcgcagcggtacgtgccgctgcaaccggccgaacagcatggacagtgcgcccatggcgaggaactgcggcgccaggtagaagccggcctgctgcgccgaggcaccctgcacctgctggaagaacagggagaggaagaacaggctggcgtagccggaaaaaccgaggacgaacgaggccaggttgcagacggcgaacccggcctggcggaacaaccccaggggcagcagcggtcgggcggtccgccgctcgacgaagaggaagccaagcaggccgaccccggccaggagcagcgccggccaggccgtgggagacaaccagccgccctctcccgcggcgatcagggcgtaggtcaacgctcccagccagaccacgctgagcaactgccccaggggatcgaaggcggcgtgctcggggtgcgcggtttcctcgatgccccacaggcccagggcgagcgccagcaggccgagcggcaggttgatcaggaagatgctctgccagccggcatgctccaccagcaggccgccgagcagcgggccgaggatcagcgacagcgcgctgaaggaggtccagccgccgatcacctgggcgcgctggccgggatcgtggaaagcctgggtaaggatcgacagcgcgccgggtatcaacagcgccccggcgatgccctggaccgcgcgtccgaacagcagcagcggcagcgaggtggccagcgcgcagagcagcgaaccgaagctgaacaggccgaccccgagcagccaggtcagcttgcgaccgtagcggtcgctcagcggtccggaagacagcatgaaggcgctcaggcacagcgcataggcgtcgaccacccactgcaggccggccaggtcggtatccagggcgtactgcagcgtcggcagggcgaggttgacgatgctgatgtcgagcgaggcgatgaaggttcccaggtaaatggcggcgaccagggcgacacgacgcgaagggttcatggagtactccgatgagagggcgctggcccaggaataatccattgaccgacggtcagtcaataaatatcgcgaaacattctcatcttcctgtcatgcctcgtcttcccctccacgctcttttacactgcggccaacccaaccaccggacccgcgctccatgcccgatcgccacgccgaacagcctgcccgccaaccgcgcaccaagcctgcggaggttcgtctcgaggaactgatggcggcggcgcagcaactgttcctagacaagggtgtggacgccaccaccatcagcgacatcgtcgctgccgcgggggtcgccaagggtaccttctatcactacttccaagccaagaccgacatcctcctggccctgcgcgagcgcttcacccaggctttccagcagcgcatcgcgaatgccgtcgaggcctgtccggcgaacgaccatcccggccgcctgcgcgcctggaccgagagcggcctggcgggctacctggagggctaccggctgcacgatgtggtctacagcgagcaccatcaccaccagcgcggcaaccaggagcgcgaccgcgtgctggagcaattggcggagctactggagaacggcgcggcggccggcgcctggccgctgcgcaacccacggctgaacgccctgctgctctactccgggctgcatggcgccgccgacgacgccatcgccggcggccgcctggatacccagccgctggccggcgaactcgccgatgccttcctgcgcctgctcggtgccagcgactgaagcaggctcagccgcagaaggtttcctgcaggtggcgccagtacagccgcccttcgtcgtcacggtgcaggactacggtggacaggcgctcgctgcgacccgccgcgtcggactggatttcccgataggccagggtcgcgccatccacgcctgaagccagcagactctcgccgtcgatctcgatgcgcagcccaggacgggtgccgcccttgctgcggaacagctcgcccagagcagtcttgtccaggaccacgccatgcggcgtgaccatcgagaagtcctcggcgaaacgcgccatcaacgcatccagcgcgtcagcccgtgagtcgccggccagccagtcgcggatcgccacgtgggcatggtggatttcccggcggtaggcacaagtcatggtgtagctcctttcaggtctggaccagggcgcgaaccccggcggaatcgatacgcctcacccacggcagaggcaatagcgtgaaagcggcggcgaacaggaagcagtggacgaaggccgcggggtcggccagcgcctgcaacaggttgagcaacccaccgagcacggccatgcccaggcagaacgccagttgccgattgatgttccacaaggcgctggcatggcccatgcgcgccgccgggacgtcgagcaaggccatgccctgtgccgcgctgctacacaggctgccgccgaatcccatggtcgcgtaggcccccgccagttgccagaagccgctcccctccccgcttcgagccagccacagcaggccgccggcctgtatcgccatgcccgccagcagcaaggatttcggcccccagcgattgaagcgtcgccgggtcaggccgatggccaggccggccgccagcgcccagggcagcatcagcgcaccggcacggctcgcgctgaggccgagggggccttgcagatagagcatggcgaccaggttggcgcccatgaaggctcccggcacgcagagatagaccagcatcgccgtacgcagcaatggcgcctccagcaagccaaggtcgagcagcgcgtcggtacgagcgcgcccgtcacgccagtagcagcagcccagcacgcaggccagcagcgccaggagcaggccacgcccgccgccgccgggcgatcccagccaggcgagcgccaccagcagcgtggccagcgccgccgagccgagcagcaggccgcgcaggtccaggcgctgcgccgcatgcttgtgcctgggcagccagcgcatcgccagggccagcaccagcagcgccggcgccacgctggcgaagaagatcccacgccaggacaggctgtccaccagccagccgccgagggcaggcgccacggcgggaacgatcagcgccaccagcatcacccgtgcggtcaggccggcccgtgccgacgccgggacattccgataggccatggcctggccgagggggatcagcaacccgccggccaacccctggcacaggcgccagacgatcaacgtcgccgccgatccagccaggccgcaacccagcgaagcgctggcgaaaccggccagtgccagcagcatcagtcgccgttctcccaggcgcgaagcgagccagacgctcaacggaatcaccagggtcaagccgagcaggtaggtgttgccgatccacgccagggtcgccaccgaagcgccaagggaacgcccgatgtccgggtaggcgacgctggcgatgaagatgttcaccaggtccagggcgaaccccagcaggtacaaagtggccaggcgggacggttgattcatgggcgctccggaggtttgccggggagcatagcgaggcgctcgcgctatctggagaggctaatcgcgcatagactgtcaaatcgaatttgacaatagggtcgccttccatggtcagcctcgaccgcttcgaaacctttcgcgccgtggtcgactgcggttccctcagcgccgccgccgacaccctcggccagacgcgtgcggtagtcagcttcaacctcaagcggctggaggccgagctgggcgtttctctgctcagccgcagcacccggcggatggccctgaccgatgctggcgaacgcttctaccagcgctgcgtgaaggtgctcgacgaggcgcgcctggccatcgacgacgcccgcgccgagcatggcgaactgcgtggcagcctgcgcgtcaccaccacccaggaatacggcctgcgccaactggtgccggccctgcaggcattcgcccggctgcacccggcgttgcaggtacaattgtcgacctcatcgctgcatgccgacctgattggcgaacgcttcgacgtcgccatccgcctggggcgcctggaggactccacccaccatgcggtgcaactggccagcttcgaggtcctggcggtggccagcccggcctgcctggcggcgctcggcgaaccgccgccgaccgacctggagagtctggagcgcctgcagaatctcggtcacagccggctggcggactccctgccctggcaagtacgcgcccccgacggcgccctgcgcagctaccgcggaccgcgccatcccatgctgctggccgacaacgccgcggccctgcgcgcctttgccctcgacggcctgggtatcgccgtgctgccggactggctggtgcaggccgacttgcgctgcggcgcactgcaacgcctgctggcggaccacgggtttccgctccagggcgtgcatgccgtttatccgccgacccgccacctgccgtcgaaggtccgcgcgttcatcgacttcctcaagactcgcctggggcacccggacgccggttagaaaaccgaggccgccgcggttgcccgcggcggcctcggcacagacgtggctcagttaccctgcggcatctcgccgcgcgccaggcgcgcattgatgtcgcggaccaccgccggcagctcggcgatggtctcgatcaggtagtgcggacgcgaaccttcgaacatctgttcgatacgcgtccgctcgcgctccagttcggccgccggcagcgccttgtactgctcgtaggtgaggcccagggcattgcccgagcaggtcagcgccaccgtccacatcccggcgcggcgcccttcgaggatacccggccaggtgtcgtcgaccttcacgcaggccgccacatcgtcgatccccagggcgatcacgttggccagcgcctgggccggccatggccggccgttgggcacttcgtcggtggccaccacgtggtcggcgacgtaaccgttggtctcggccagggctaccaccttctccatcaccaccgccggataaccggaacaggaaccgatcttcaggcccatcccgcggagttcggcgatcgcctgcagggcgccggggatcagcgccgaatgttcggcgatcttttcgatctgcagcggcatgaagcgctcgtagatggcggtgacatcgtcgtcgctgggcaggcggccgaagacggcgcggtagcgctcggcgatcgccgggatgtcgcagagggtgcggatgtggtcccacttgcccattcccatcggaccgcgcgcttcctccaggctgacctggacgccgaattcggcgaaagcctcgacgaagatctgggtcggcgcgaaggagccgaaatcgaccacggttcccgcccagtcgaggatggcggcctggagggtggctggctggttgtaattcattgtcgtgaacccttttctgctcgttgtcgttcagttcagatctcgaggacttccagttcgcgcagcgcctcgccgatggcggcgaccgcctgccgcatctccgcggcgtcgacgtggccgatgcagccgacgcggaaggtttccacctgggtcaacttgcccggatagaggatgaagcccttctcccgcacgcgttggtagaagtcggcgaagcggtagcgcggatcgcgcggcgcgtggaaggtaacgatgatcggcgcctggatttccgccggcaggaagctgcggaaaccgagccgggccatctcgccgagcagcgtttcgcaattgctcgcgtagcgccgctggcgcgccggcaggccgccctcctcttcgtactggctgagcgcttcgtgcagggcggcgaccacatgggtcggcggggtgaagcgccactgcccggtcttgcgcatataggcgtgctggtcctgcaggtccatggccagggagtggcagttgccggcgctggcttccagggcggcgctgcgggcgaagacgaagcccatcccggggacgccctccaggcacttgccggaggcggcgatcaaggcatcgaacggaactttccgggcatcgatcccgatcgccccgaaggagctcatggcatcgacgatcaggcgcttgccgtgacgctcgacgaccttggcgatggcctcgagcggattgaggataccggtgctggtctcgcagtggatcagcgccacatggctgatcgccggatcggcggccagcagacgctcgacgtcagcggcggtggtcggcacgttctcttcggtctcgaaggtgctgaagggccgttgcagaacctcgcagatcttcgccaggcgcttgccgtaggcaccgttgatcaacaccaggaccttgccgtcgcgcggcaccagggtgccgatcgccgcttccacggcgaaggtgccgctgccctgcaacggtacgcaggtgtggctgccttcgccgcctacgatcttcagcaggcgctggcagacgctggcggtgagttcgttgaaatcgctgtcccaggagccccagtcgaccatcatcgcccgacgggtacggtaggaggtggtcagcggaccgggggtcagcaggatgggtgcgcgttcggcagtgctcatgctcatttcctctgcgggaatcggccaaagaaaccggatcgggcttcgcggtccgggcggtcgttccgcgccggcgttccagggaagcctggagacataaggtgagcgccgcgctactatcgttcaaattgtttgttccgatgccagccataagccaggccgataccatgaatctcttccagctccgcgccttcgacgccgtcgcccgcgaaggcagtttcacccgcgccgccgagcgcctgtgcatcagccagccggcggtgaccggacacgtcaaggcactcgaggagcactaccaggtcaccctgttccggcgcaccgcccggcgcatcgaactgaccgaggagggctcgcgcctggtggcgatcacgcgcaccctgttcgccctggaggaagaagccgaggccctgctcgacgccaatcgacaattggtctccggccgcctcgaagtcgccgccgacggcccgcacctggtgatgccgatgctcgcccggctgcgcgcgagctatccgggaatcaccgtcaacctgcgtctgggcaacgcccaggagaccctcgcggcgctgctcagcgaacacgtcgacgtcgccgtgctgaccgaggtcgaggcgcgtcccgggctgttcctggaggagttggtgaattcgcgcatctgcgccctgttgcctcgccagcatccctggtgcgaacgcaacgaaggcgtaccgctggaagagctcgaccagcagatcatggtgctgcgcgaacccggttcgatcacccgccgcaccttcgaccgcgcctgtgccgagcagggcgtgcagccgcgggtactgctggagctggacagccgggaagcggtgaccgaagcggtggccgccgaactgggcgtcggcgtggtgtcttccctggaggtcggcaacgatccgcgggttcgcgcggtgccgctggtcggtcccgagctgaccaaccgccacctgatcggctgcctggagaagcgccgcggcctacgggtgatcagggcattcctggaactggcggcggcctgagtcgcgcctcagctccagtgacgctcgcgggtgcggcggtcttcgccgaagccgaacagcgaggccagcgaatacacgatcagctcggcgatccaggcgaccagcaaggcgcagcccaggccccaggcgatcacctcgggcttgagcaggacctggtagctgtagctggcataggtttccatcagcaactcatggttcggtgcgcgcagcatgtgccaggcgcgggcgtaccagggaccctgcatggcctgccactcagcgtcgagcatgcgcgcgcgacgcatcaggcggtcgaggttctcgccgtcgcgctggaacaccggatcgctgttgctgcggtaatgcctgaccagttcctccaggctaccgttgaagaactgcccggcggtctgctggaagccctggatgttctgcgcggcctccaggcgatgggcgtcgacgcgcttggcgtagtcgtcgatgaaaccgggcacctgcaccccgagcagcaggcccagggtgaacagcagcagtctcaggtaactgcggaacatgcgctctcctcgttcacggcggcgattcagacccgccccttggccaacacctcgccgccccaccagaggacccactcgccgctctgctgcaaggtccagttctcgttgtcggtgagcggctcggtggcgatcaccgtgaccacatcgtccggcgtggtttccgcatggaagtccacggtcaggtcggcatccttcaaccgcgccgggccgaatggcgcacggcgggtaatgtaggcgagtttgctggagcagaaggtgaacagccagtcgccgtcgctgatcagggcattgaacacacctttcttgcgatattcgtcacaggccgagatcagcaccggcaacagcacctccaccggcaccggctcggggaaagcccggcgcacgcggttcagcaggtcgcagaaggccgcctcgctgtcggtctcgccgaccgggcggtagaaaccgggcttgggctggaagtcggccagttggccattgtgcgcgaaggtccagtagcgcccaccgagttcgcggatgaaggggtgggtgttgctcagcccgaccttgccgacgttggcctggcggatgtgcccgatgaccgtctcgctcttgatcgggaagcgctgcaccagccgcgccacctccgaatcgacgctcgccagcgggtcctggaacagccgcacgccgcgtccttcgtagaaggcgatgccccaaccgtcgcggtgcgggccggtaccgccgccgcgctgcatcagtccggtgaagctgaagacgatgtccgtcgggacgttggcgctcatgcccaatagttcacacatggctcaaacctccctgagcaaggctgtacgtagtagttctcgttcccgctgcagacgcgcctgcaggctcgcgcgaccgaccggcaggaaacgggtcagggcgcgccagagcagtcgcggcaggtcgccgagacgccggggaatcaggtgcagatgcaggtgcgccacgtgctggttggccgccacgccatcgttgagcaacaggttgatgccttccacgccgaaaccggcccggcgcaatgcgcgaccgatacgctcggcgagcgccaggagggcgtcgcgggcggcggcggaaagatcgctcaggtgcggggcgtgctcgcgggctacgatcagcacgtgcgccggtcgcagcggaaagatgtccagcaggacgatgaaatgctcgtcctcgaagagtctgtgcgccggctcgcggccacccgctatggcgcagaacacgcaatccatgggaaatcccgacataggcctcgcctcatgctgaacgcctgccgggcgtagcgcaagaatggatttcgtcgcgaaaggctacaggcgcggctcgatgcgcatgcgccggtcgccgtgctcgtcggtgcgggtgtcgacgtccggcatcaactcgggctgcatcatctgccgcagggtcggctcgtcctcggcgtcctgcgacggatgccgacgattcttccaggcccgctccagcggccagcggatggcggcgatcagcaggtacaggccgaaaccgagcagcgccaccagggccaggtcagagaccgcgcgccaggcgttgttgccgaccttgaacacgacatccagcgcggtgatggcgatggccggggcgtagaggtcgttctgcgggtccaccggagtcggcgtgaacagcaggatgaagacgatcagccgcaggggttcgcgcagccagcgccacatccagccggtcatcagccagaacaccagcatcaggccgagtccggcgatggcgtaggcgccccaggcgatcagatagtcttgttcattcatgcggcgtgcgtggcgatagcggtgatggggggcttatgatagccgcttttgcatgccgacgcgcctacccaccgatggcgggcgccgcgccgccagttttattcagatttcccggcctcgcgcatggccggatcgacgaggattcccgatgccccatccgcagccccccatcgcccgccgcgacgccggaagcgacccctacgcctggctggaggagcgcgacgccccggaggtactcgactacctgaaggccgagaacgcctacctggatagcgaactggccgaccaggccgggttgcgcgagaccctgttcgaggagatcaggggacgcatccgcgagaccgacctgtcgttgcccagtccgtggggtccgtggctgtactaccagcgcaccaccgccggcgacgaatacccgcgccactaccgctgcccgcgtccggcggacggcagcctggcggtcgacgaaggcgccgagcaactgttgctcgatcccaaccagttggccgacggcggcttcctctccctcggcgccttcagcatcagccccgaccagagcctgctggcctacagcctggacaccagcggcgacgagatctaccgcctgttcgtcaaggacctcgccagcggcgcggtgcaggccctgcccttcgacgactgcgacggcagcctgacctgggccaacgacaaccgcacgctgttcttcggcgaactggacgacacccaccgcccgcacaagctctatcgccaccgcctgggcgaggccggcgccgagctggtgttcgaggaaggcgacgggcgcttcttcctgcactgctaccgctccagctcggaacgccagctgatcctcctgctcaacagcaagaccaccagcgaggcctgggtgctcgacgccgaccagccgcagggaacgttccgttgcctggcgccgcgcgaggaaggccacgagtactaccccgaccacggtcgcctcgacggccggggcctgtggctgatccgcagcaaccaggcggggatcaacttcgccctctaccaggccgaggagtcgcggccgactcgcgagcactggcaactgcgcgtggcccacgacccgcagcggaccctggaagatgtcagcctgaacgccgaggcggtgatcctcggcctgcgcgacggcggcctgccggttatcgaggtgcaaccgcagggcctgccggcctaccgcgtgcagttgccggacgccgcctacagcctctacgtgcaggacagcctggaattcgacagcccctgcgtgcgactgcgctacgaggccctgaaccgtccggcgcaggtacgccagctgaacctcgccgatggcacgcagaccgtcctcaagcagaccccggtggaaggccccttcgacgccgacgcctacgccagccggcgcatctgggccagcagcggcgacggcacgcaggtgccggtcagcctggtggcgcgcaaggaagtcctcgacggcatcgccgccgggcgccccgcgccgctctatctctatggctacggcgcctacgggcatagcctcgatccctggttctcccacgcccgcctgagcctgctcgaacgcggcttcgtcttcgccatcgcccatgtccgtggcggcggcgaactgggcgaagcctggtaccgggccggcaagctggaacacaagcagaacagcttcgacgacttcatcgcctgcgccgagcacctgctcgccgagggctactgccgtcccgagggcctcgccatcagcggcggcagcgccggcgggctgttgatcggcgcggtgctcaaccagcgcccgcaactgttcggcgcggccatcgccgaggtgccgttcgtcgacgtgctgaacagcatgctcaatccggacctgccgctgaccgtcaccgaatacgatgagtggggcaacccgcaggagcccgaggtgcatgcgcggatcgccgcctacgcgccctacgagaacgtcagggcccaggactacccgcacctgctggtggtcgccggctacaacgacagccgcgtgcagtactgggaagccgccaagtgggtggcgaaactgcgggcgaccaggaccgacgccaacctgctgctgctcaagaccgacctcggcgccggccacggcggcatgagcggccgctaccaggggctgaaggacgtggcgctggaatacgccttcctgctcaaggtcctcggcctggtatgaccaccgcgggggccggcgacgccggccttccgccacgaaaaagggaaccttcgtgaaacgacgcttctggcccgcgatgggcctgctcgccgcgatcatgctggccgtctacctggcgaatccgttcggcaccgccagtctcgacccgcgcgcacggctcctcggcgtggcgctgtacaagatcccttcgcgctcgatggaaccgaccttgcaacagggcgacttcatcctcgccaacgccgcgcgctacgccttcgccgacccgcaggtcggcgacctggtggtgttccgcttcccgccgcagcgcagcatcgcctatgtgaagcgcatcgccgggatacccggcgatcgcgtgcggatcgatggcggccggctctacgtcaatgagcgcccggtgacggagccctacctggcgcaacaggcgctgcgccagccggactccctgcgcatggccgagcggaccgtccccgccggccaatacttcatgctcggcgacaaccgcgacaactccaacgacagccgctactggggctacgtaccgcgcgccgacctggtcggccgggtgttcgccgtctggtatgccgaggacacccggcgcatcggttcggtgcgctgatgcccctcagaagaactgggtgacgctgatcttggcgttgcgtccctggctgtagaccaggtcgccgcccagcggctggcgataggagcggttgaacaggttgtccacggtgaagtcgatgcgggtgtccttcaggcccagcttggccgggacccactcggcgaacagccgatgggtgtcgtagctgtcgttggccgcgtgatcccagtagatatcgccggaaccggtacccatcccgccgctgtagcgatcgctgggcaggcggtcggtcttgcgcacgaactcgccctgccagccgagcttggcatcccattccggaaccttcaggccgagcatggccacccacttcggcggcgggatgtcgcgcgcccacacgttcggtccccagggattgctgtaggccccatcgtgcttgccggtcatccacgagtaggacaggctgccgaacagccgctggctgtcgtagaagctctcgatctcgaagcccttgatggtcaggcccggcaagttgcggtagttgctcagcggcagcatgtcgccgcagctaccaccgatactgccgttgtcgatcgactgctggcggcagccgacgctgcgggtgcggaatatctcgtccttgatgcggttctggaacaacgtggtgcggatctgcaggctgtcgccggcgaccagcaggtccggcaggttgatcacgctgccgccacggatcgcatggatgcgctcggcgtccaggtcgcggctgctgccaccgatggtcgaactgttctgcacttcgtactgctcgtcgatcaccggcgctcgccaggtctcggtgtagtcggcgaagaacgccaggttcggcgtcgcggtccagaacaccgacagccgcggcgaccagccggagtaggtctgggcgcgatagtcatggccgagcttgggattgtcgtagatcggcgccaggttggcctggccgtcgttgcgcacgctgtcgaagcgcatcgatggggtgacggtcaggctgccgtaggtgatcgcgtcctggatgtagaagctctgcgtgtcctgcttgccggccggcatgaatgccggttgcagccagccgtagttgtagcgcggggtctcgtaggtcttgcccggcatgtgcatgaggatgtcgcgcttgtgcttgtgcagcgccgcgcccagggtcagctcgtgctgtagcgctccggtatcgaaacggctggtgttgcgcagctccaggaccttgtcctggtactcggtacgcatccgtttgccaccggtggcgagctggtagaaggcggtgtcctcgcgacggtcgagttgctcggtgcgggcgtcggaatagctcagttgcaggtcgatccaggggttgtccagcggatggtagttgtacttgccggtccaggtggtgtcggtggtatcgcggtgggccagcaggcgggtcaggcccagctcgtagccgtagcggtcgatggtccactggctcggcggggtcgggtagctgctggcggagaacggcgtccagcgcgagcttttcgagcgcaggtaggtgaaacccaggtcgtgctcctcggtggggtgcaggttgagcttgaacaggccggtcttctcgtcctgggcgctgttgggcaggcgcttggggttgatcgggtagtcggtgggcgacagcggcaggttgtcggccagcttcatgtcgcggccgtcgcgaccgttgagatagagcagggcatcgacgcggcggtcttcgctgcgaccgaacacggcgccggagtagatcttctgctggtcgttggagtgatagccgtacttgagcatggcgccgacgtcgcggccttcgcgcagcaggtccggcgcgtccttggtctccatgtgcacggtgccgccgaagccgccattgccggtgaacaccgagtgcggtcccttctccacctcgatgcgcttgatcatttccggttcgatgaacacggtgccctgctggtagcgctcgaagccgctcttctgcgcgccgtccagggtatagggcacgtcctcggcgtcgcccaggccccagatgttggtggtctgtccgcccggcttgggcgagccgcccatggtcactccgggcagggtctgcagcaggctggggatgttgtccgcctgctggcgttcgatatcccgccgggtcagggtcgaacggccgacgttgctggcgtccacttcgcgaccgttgccgacgatggtctgcgcgtccagttgcagcgcgttgtcgctgtaggcgtcgacctggcgccggcgcaccacgtagccgccgcccgcctccaccagctccagctcggaaccgaccagcaaccgctccagcgcctcgcgcaccccgtagctgccgctcagcgccggagcgcgcaggccccgcaggagcgactcgtcgaacagcacctggacctgcgcctgctgcgccaggcgcgacagcgaggcggccagcggctgcgccggcaggtcgaagcgtcgttcggcagcgctggcgccggcggcccacaacgcggcgccgagcacggcggcggaacacagcgggcgccaggcggcgcgggtgaaaggcaaggtcatgctggaactctccccaagtgactgctggatgtcgccggcagcggcgacggacagcagagaagacgcagcagggagaaaaacccacatatgcgaatgaaaaatattttcattaatgctgacgacgcgcctcagcgcgccaggatcagcacctcgccaccagcctgcggctgcacccgcaccggcaatagcgccggcagggcgaggagaaaatcgtcggggcgggcgatccgcaccgtaccggagacccgcttgccggcaagccggggatctcccaggcggatcggcgcggcgcgatagcgcgacagttcctccaccagttcgcccagcggcttgtcgcggaacaccagttgcccatcgcgccaactggcgacctgctccggcgccacatggccgagttccaggcgctgctcggcgaggtccaggcgcgcgctgtcgccagccagcagcacatgttcggcatccttctccagggacggctgcaacgccacgcgcccctgtttcaccgccacggcgagggcctgcgcgttgcgccggacgctgaactgggtaccgagtacggtgacccggctgtcgccgctgccgacccggaaaggccgggccggatcgtggctgaccacgaagaacacctcgcctttcttcaacagcacgtcgcgggtgcgctcggcgtaacgcacctgcacctgggtatcgacgtcgaggaacagcttcgatccgtccgccaggaccacctcgcgctgctcgccaggtgccgtgccgtaggcgaggttcggtccgagcgactggtcgcgccagaacagggtggcgacgagcagcgcgcaggacacgaagaacgccgccgccagcgcccggggcaggcgccaggccggcaccggctcgggaatatcgtccagcgccgggcgcggcaggccgtcgaattcgcgccagagccgctccatgccctcgagcgcttcgcgatggcgcggatcggcgcgtagccaatcctccagctcggcccggcaggcagcgctgaaatgcccggaacgacgccggctgaaccagtaggcggcgcggtgatcgatgtcctcttcggtttcgtctgcgaacagcggttccagtcgttccagcggcttcatccttcgcctccctggccaagccgccgcttgcagtgcagcaaggcgctggcgatgtgcttttccaccatgctcagggagattcccatgcgctcggccacttcgacctgggacaggccgtcgaacttgtgcaggacgaacgcttcgcgccgccgcggcggcagctcggccagcgcggccgccaggtggctgagacgctgctgctgttcgaaacgctcgcccggcccggccgcctcgccttccagcgcggcgggttcgtcgttcgccgccggccggtcgagatcctggccgcggctctgctgccggcgccaatggtcgcgcaacaggttgcgggcgatctggaaaagaaatgcgcgcggctgctcgaccgattgccggcccggccatttcagccactgggcgaaagtatcctgggcgaggtcggcggcgtccgccgaactgcccaggtgcttgcgcaggaagcgcagcaactcgccatggaacgcctgataggcatgcgagacggaaccacggaagcgctcatccatccgtgcatcctccggcggcgccccccgcgccgttgacccgctgcaacacctcgcctccccgcttccgtcggatacggaagtcccttgcaaatatgcgaatgataatacatatcatttcacaaggtaaggaagtgcgacggacgcgagctcagccggcgcggaagatcaggtagtcctcccagtcgtcctcggccacctgggtctcgctgagcatgcgcccggactgggaaatgcgttccttgtggacccgctccgggtcgccgcagaccaggtggtgccagagcggcaggtccttgccttcggcaaccaggcgatagccgcaggtcggcggcaaccactggaactcgtcggcctgcgccggggtgagctggatacagtcggggacgaaacggatgcgctcggcgtagttggtgcagcggcagctttgcaggtcgagcagcttgcaggcgatacgcgtgtaatagacgctgccgtcgtcctcgtcctcgagcttctgcaggcagcacaggccgcaaccgtcacacagcgactcccactcgtcctggtcgagttgggcgagggtcttgcgtttccagaagggttcgactttggcggccatggcatcgggggctggtgaaaaggcgcgatagtctagtcccccgccccctccaggccaagcaccggccggcacatggctacttcaggtaggaacgcagcgcggtcaccaccagttccaggtcttcgcgacgctgctccgcgctcgcctgctcggcgccgaggtgttcgcggatgtgcccctccagcacttcgttcatcaggccgttcaccgcaccgcggatcgccgcgatctgttgcagcaccgccgcgcattcgctgccctcttccagcgcctgctccagcgcccgggtctgcccggcgatgcggcgcacccgcgccaggagcttcttcttcccatggatggtatgggccaccgctctctcctcaaggtaatatactggggtatagtatattttcgacgtctcgacaggacagtagcaaatgcccggcaccccgactacccagcccctgcgccattcccatcggttcgaccagggcaacccgctggccgagcgcaacacgcgctgggcggtattgctcaccgcctgcatgatggtcgcggaaatcgccggcggctggctgttcaactccatggccctgctcgccgacggctggcacatgagctcccatgccctggccctgggtcttgcggtactcgcctacggcgccgcgcggcgctatgccaacgacccgcgcttcagcttcggtacgtggaagatcgaggtgctcggcagctacaccagcgccctgctgcttctgctggtggccgggctgatgctctaccaatcggtcgaacgcctgctcgaccccagcccgatccactaccagcaggcgatgctggtcgccgcgctcggcctgctggtcaatctcgcctgcgcctggctgctgcgcgacggccatgcccaccacgggcacggccactcgcaccaccaccaccacgaccacgaccacgaccacgaccacgaccatcatgcccaccggcacgatctgaatctgcgcgccgcctacctgcacgtgctggcggatgccgccacctcgctgctggcgatcgtcgcgctggccggcggcctgctgtggaatgcggcctggctggacccgctgatgggtatcgtcggcgcggtactggtcagtgtctgggcatgcggcctgatccggcagagcagccgggtattgctggatgcgcagatggacgcgccggtggctgcggaaatccgcgcggcgatcgccagcagcccgctgccggcggaactgctcgacctgcacctgtggcaggtcggccagggcaagtacgcctgcctgctgagtctgctgaccaccgaggaaggcagcgccgactatttcaagcgccgcctggccgagcatgaggaactggtgcacatcaccgtcgaggtgaacccgctgctcccgctcgccgcctgagggaacgcggctcagtagccgcgagcgaagtccacctcgccgcgcatggcggtacccgcccagaagcgcgcgaggttgtcgcggaacagttcgaccatcgcccccggcagggtcggcgcggcggtgtgcccggtcagcaagaggcgcggggtatgccagaacaggtggttggccggcagcggctcttcgcggcagacgtcgatcaccgcgccggccagttggttgttctccagtgccgccaccaggtcggcgtccaccaccgcgacaccacgcccggcattgataaacagcgccgtgggcttgagccgggcgaacagcgcacggtcgtagatgtcgtgggtatcgggggtgtcgggcagcaggttgatcaggtagtcggccgtctccaccaggcgaccgaggtcgtcgagcgaccccatgcggttgaacggcaccagcgaacgcggattcttcgccaccccggtcaggtccatgccgaagccggacagggtatgcgccaccgcctggccgatctccccggtgcccacgatcaccacctgccggccacgcaacccgccaggcgtgcggctatcccattgcgaaccgacctggctggccaggcgaccgaggaactggcgctcgtgggcgagcatgtaggtcagcaggtattcgctcatcacctggccgaagatgcctaccgcgcgtgtcaggctgtagtccttcggcaggtcggcggccagcagcggcgtgatgcccgcccaggtcgactgcacccagaccggatgcacgccctggcgcagcatctgcgccaccaggtcgggctggccgagccagatcgagcactcgctggcggcgtcgatgagttgcaggggatcgccccccgccaccaccttcaggctggggtcggccgccatcagcagcgcggcatagagagcgtggtcacgttcgagaatcagcaagcgcatgggtcacactgccaagccggacaagggctggcgatcaggccggagaatattgttctttcatgcatcacggctcctggagggaagccctcgagagcagcaggtttggcgctggtagaccacggtcgctgccaggggttccgctatcgtgcgacatcttgcggacatcatgcaccgaaggcgcaaccttgcacagagcgggtttcacgtcgtgaaagtggcgccgggaagccggcgccagcggggtacggctcgcgtcagagcgggtcgttcatgcgcagcaactcttccgggagatgctcgatgtactcttcttcgcccggcggcatctgcaagtggaagccctgcttctcgatgttctccaggaccttggcgacatcctcgcgggccagttggcgctcgggggtgagcagcaggtcgaagacatgttgcggcgcgccgaacggcaccagcagggcctcgggtacgcggctcaacgcctcgcgcttgtcgacgtagaggtacatctcgttcttgcgcgggctcttgtagacggaacagattcgtttcatgcgctctccagggcgtccagcagggcctggcccatgcgttcgcggcgccagccgcggagggaatcgggcagttcgtagggaccgtcgggatagccgctcttgagcagtgcctcgaggatcttcttgcgcagcatcagctcaggcgccatgcccagggtctccgcttcgcgctggccgatggcgcgcaggctcttgagcagcggggtgacctccggcggcagcggctcgggcagcgcctcgggccattcgctctgcggcaggcgcgaagcctgggcgatcagttcgatgaggaagtcgccgtcctggcgcacggtgcgcggatgcatgtcttcgatcgccgccaggtcggtcttgttcttcggcagcaggcgcgccagcggccacagggtacgttcgcgcagcacgtggttgcgcggccggttgcgcaggcgtgcctgctcctcgcgccaggcgcagagttcgcggagcaccgccagttgctgcggacgcagccgccaacccagcttgacctcgcggtaggcctcgcgcggatcactctcgcggcagaggttggcgaccagttcggcgccgtcctccagcagccaggcgcgtttctcctcgctcagccgcgcatccagggccaggtagacctgggcgaggtgctggacgtcgtcggcggcgtagcgcatctgcatctcggtgagcggccgttgcaaccagtcggaacgggtctcgtccttgggcaggtcgatgtccagcacctccttcaccagcttcgagtagcccatcgaatgggccatgccgagataggcggcggccaactgcgtatcgaacagcggcaccggcaggctgccggtgaggcgcaggaacacctcgaggtcttcgctgcaggcatgcagcaccttcaccacccgctcgtcttcgagcagctcggcgaaggggctccagtcctggatcagcagcggatcgatcagccactcctgccggccatcgcccacctgcaccagaccggccgcgggatagaaggtatcgacgcgcatgaactcggtatcgagcgcgaggtacggctgtgtgcgccattcccggcattgctgcgccaggctggcatcatcgcggatccactggatttcgggcgcggtcacgaacatctccttggtcaagtgcggcgcattatatagagcctggcgccatgcgagcattccgctcggcaccgcgcttgccgatgagcgtagcgaatgtccatactccgccctttgtccgacaatccgaacaagggaactgcatgaagaagctcagcggaataatcgtcctcctgctggctggcgcggctctttacctggccctgaagaccagcccgatcgacccgctcgcctgggatgctccggccgctccgcagatgaccggggtcctcgaacccaacgacaccctgatgaaggccgagctgcttggccagggccagttgcacggccccgaggacaccgccgtggacagccagggccgcgtctatgccggtctcgccgacggccgcgtggtacgcctggacgccagcggcaaggtcgagaccttcgtcgacaccggcggccgcccgctgggcatggacttcgatgccgccggcaacctgatcctcgccgatgcctggaaaggcctgctgcgcatcgatccgcagggcaaggtggaaaccctcgccaccgaggccgacggtgtccccttcgccttcaccgacgacctcgacatcgccagcgacggccgcatctacttcagcgacgcttccagcaagttccaccagcccgactacatcctcgacctgctcgaggcccgaccgcacggccgcctgctgcgctacgacccgtccaccggcaagaccgaggtgctgctcaaggacctgtacttcgccaatggcgtggcactctcggcaaacgaggacttcgtactggtcaacgagacctaccgctatcgcatcacccgctactggctgaaaggcgagaaggctggccagcacgaggtgttcatcgacaacctgccgggcttgccggacaacctccagggcgaccgcaagggtaccttctgggtggccctgccgaccccgcgcaaggccgacgccgacttcctccaccggcatccctggctgaaggcgcagctggccaagctgccgcgcatgttcctgcccaagccgaccgcctacgggctggtcatcgccatcgacgaacagggcaggatcgtccgcagcctgcacgacaccagcggccaccacctgcgcatgatcacctcggcgaagccggtgggcgaccagctctacttcggcagcctggaaaacgaccggatcggccgcctggcgatcccctgaaaaggccgaggcgaaaaaaagcccggcgcaagcgtcgggccaagccaatcggacaagcgtcccgagggatagaacacaggagcgggtatctcggaacgagccgattctgcatgtctggacaaatcccccgctgccgggcgaggctgatgaccgagtaggaatcttcctcgcctggagccagccctttcctttcgccatttctccacctcgccgcgcgacgccgggatgacgcgacgcggtccaaggggcatgatccacccattcgccaccggctttgcttcccgacccaaggagtccgcgatgtcgtccgcccaactgctgaccgcgcaacaactggccgcccgcctcagcgaacccgacctgctggtcctcgactgccgtttcgccctcgaagacccgtcctacggtgcccgcgtctatcaggagaaccacattcccggcgcgcatttcgccgacctcgaacgggatctttccgctcccgtgcgcaagggcgtgaccggtcgccatccgctgccggatcccgccgagctagcgctcaagctacaagcctggggcctgcgccaggatagccaggtggtgctctacgacgacggccccggcgcattcgccgcccgcgcctggtggctgttgcattggctgggcaagcgcgatggggtctacctcctcgatggcggcctggcggcctggaaggctgcggggctggcactgaccaatggcgaaagcagtcttcgacccggcgatttccagggccagcccgatgcctcgctgttgatcgacgccgccaccctccaggcccaactgggccaacccggactggcgctgctcgatgctcgcgcgcagccgcgcttccgtggcgaagtcgagcccatagatccggtcgccggacacattcccggtgcccagtgcgccgccttcaccgacaaccttggcagcgacggccgcttccttccaccggaacaattgcaccagcggttctccgccctgttgcgcggtcgcccggtggacgagctggtcgcctactgcggctccggcgtcaccgcctgccacaacctgttcgccctgagcctcgccggcttcccgcttccgcgcctctacgccggctcgtggagcgagtggatcaccgacccgcgccgcccggccgccaccggcgactgacgccatacgctcggacgcggcttacgccgcgtcgggcagcttcctgaagtagtcgagcaactccttctgcaacgcctcgttgcggaacagcccgaaatgcccgaccgccccctcggcccgtcccttgcgacgcaactccaggtgcgccgcggcatagacctggtgaagcttttccgccgcagcccagggcacgtagtcgtcgtcctcgaacaggaagctggcgacggggatgtccagcgcctcgtaaccctgccgctgcaatccgaagcgcggtgccaggaggtagtccggctgccgcacccagcgcgcccagtcgcgcatgaaatgactcggcatatccaggctgccgaggccgaagaaacgactgggaaagcgtcggagcagtccggtcagtagcggcaccgccacgcagaacaggccgaacatctgccagcgttgcctgcctcgccagcgcctccagtacggaaacgaaccggcgacgaacgcggcgccgctcaatccgctggcctgtccagccagaccgagcaactgcgcgccgatgctgtggccgacgaaatagcgcggtagctccggcgcgcgcgctcggcaccaggccagcgccgcatcgatgtcctcgcgtccccagtcggccaggcgatagctagccacggcagggtcgtcgccttcgctgccgcggtagctgaacaacagcacctcgtagccggaagccgcggccaggacggcgaagcgctggtagaaggcgcgcctgacgccgagcgcgcaggccaccacgatgctcccctgcgcatcgccgacggccgggaagtggtcgccggccaggcgcacaccgtcacggcaggcgatctccactgcggtactcattcgcgctctcctttgccgtgcgggttcgagcagccgggacggacgcaatgctcgacggatcgccaggcgtgctagcatgaacataccgacggtatgtaagaaggcaacagtatgaatgtcaagagcaggcagcaggaaaatgccgaggcgacccgcgaggcactgctggaaagcgccctctccgccttcgtcgaacatggctatggcggcgtctccatcgacgccatcgcccgcgaggcgcgcgtgaccaagggcgcgttctaccaccacttcggcagcaagcaggaactgctcgccgaatgctacgaacgccaggtacggacgatcgccgaggacctggacagggtgccggcgcaggtcgacaagtgggcggaggccgccgcactggccgaggccttcatcgacagcgtgatggcgcgcggcaagcggcaactgtcgctgcaggaggtgatcacggtcgtcggctgggagcgatggaaacgcatcgactcgcgccatacgctgcgctacgtcgggcgcctggtggacgaactggcggccagtggcgaactcaaggactaccgccgggaaaccctggtcggccagctctacggcttccttacccaggccgcgatgagtcttcgcgatgcacgcaacaagcggcaagcggccaatgaagtgaaagccatcatccgcgacttcctctacagcctgcgcaggggctgagaatgccgcccagcacaagcgaagcaaggacacgccggtttaatttccagcgggcatatcagccgttctctaaagctggaaacaatttaaaaacagtcctttacagctgacttgtttcactacacttcaaatcaagcggctaagtccgctatcggcggggccatcggaatagaagctgccaaactgcccggccccgccgatccaccttgcgcgaggccgtcatgggtatttccgccaacgatctttgccagcacgtgatacgcccgaccctggactacctgtcctgccacagccccgccgccgaagcgctgctgctgggcgcggcggcctgccagtcggcgctggggagcgccctcgacgaccgccgtggccacggcctgtaccggatcgccagcgaacgccaccagcagctctgggaccagtacctggcgctggacccggagcgcgccagccgggtccgcggcctggccagccagcatgccttcctcgccgcgccgcacctggaactgacggtgaacctgcgctacagcacggccatcgcctggtcgctggtggaagccgcgcgactgccactgcccgaccagcacgaccacctcgcccaggctcgcgtgtggcgccaggtattccagccgcacggtcgcctgcacgagttcatcgacgcctggcaacgctgcatcggcagcctcagccaggtcgcctgacggcgaatggaaaaatcccgcgtccgaaacagaccaaccggtcagaaaattttttacatacagacacgaacggttgcgctaccttcgcttcactggcaccggagccaaccgctctgttccgcaccctgcggaacttcggaacactggcgccggtctgggaatcttggtagtttgcgcgccgttatacacaggagttgctccaacaatgaaaacaatatggtttaaaacctctctcgcactgaccattagcgctgtctccacctacaccctcgccaacggcatcgccatcaacgaacagagcgccagcggcgccggcaccgcctacgccggccgcgcctcgtccgcgctcgatgccagcaccatctacggcaacccggccggcctgtccaagctgaaacgcaccgaagtcagcggcggtctagccatcgtcaaggccaaggacgacatcagccaggcccacagcaccgcccagggcagcaacaagggcgactcggtaccgctggccgccgtaccgttcggctacttctccacgccgatcaacgaagatttcactttcggcctgggcatctacgtgccctacggcatcatcaacgattacgaaaacggcttcatgggcagctcccacggctcctatagcaaggtgcaggtgatcaccgtgcagccgaccatcgcctggaagatcaacgacaaggtttccgtcggcttcggtccgaccttcaaccgcatcgacggccagttgaagaacaccctggccaccaatggcctgctcggcagcaacggcgataccaagatcaacatcaagggcgacgacaccgccatcggctacaacgtcggcgtgatggtcgacctgaccgacgacaccacctggggcctgacctaccactccaaggtcaagtaccacctgggcggcaacaccgaagtgaagaacgctccgggtgccctgggcctgaacggcaagtacgatgccaagctggacatcaccctgccggaatcggtggatacctccatcacccacaagttcgacgacaagtggacgggctacctgggcgccgtctggacccgctggagccgcctggagaagatcgaggtgcgcaacagcggcgtaccggcgctcggccaggccctgggcttcaacaccatcggcgaagacctgaactggcgcgacacctggtccttctcggtaggtacctcctaccaggccaccccggagtgggtgctgcgcaccggctttgcctacgagccgtcgccgacctccaacgaggaccgcaacgtacgcatcccggtgggcgaccgcaaggtcttcaccgtcggtgccggctggtcgccgaaccaggacctgaccgtcgacgtggcctacgcctacctgtgggaaaccaccgccggcgtcaaccaggaaggcagcgccctgcagccggcctacagcgccaagtacgacaacagcgcgcatggcctgaccgcccaggtcacctatcgtttctgatcgcacgcgccaacgaagaagccgggcaatgcccggctttttcatgcctggccgcccctcagggctggctggcgatggccttctcgatggcggcctggagctgcggatcgtccggggtggtcttgctggagaactgcgcgaccaccctgccctggcgatccaccacgtacttgtagaaattccagcgcggcgcctggccgctctgctcggccaactggcggaacagcgggatcgcctcgtcgccgcgcacgtgctgcggctgggtcatggcgaaggtcacgccgtagttgccatagcagatcttcgcggtctcggcggtatccgcggcttcctgcttgaagtcgtcggaaggtaccccgagcacttccaggccctgccccttgtaacgctggtagagcgcctcgagccccttgaactgcggggtgaagccacagtggctggcagtgttgaccaccaccagcggcttgccggcgtaacgctggcaaagatcgatgctttccttggaacgcagcttggtcaactggccctgcaacagttccgggcaatcggcggcccagccgctcagcggcagcccggcgagcgccaggacggacaacagcacgcgaggtttcatggaatggctccttggcgacgaatgtcccagcttacccttccccgcgcctatcgccacctatcagcatgcgcccatgcccagttccagcagcgccagtccgccacgctgccagccccaccaggcgagtcccagcagcgccccggcggcgagcagccaggccagtttcacgccgcgcctccggccacctgcaggcgcgccaccggacgctcgcgcaccggccagttgagcagcgccgcgagcaggcttagcaggatcgacaactgccagaccaggtcgtagctgccggtgcggtcgtagaccaccccgcccagccagccgccgaggaaggcgcccaactggtggaagaggaacacgatgccgccgagcatcgacaggttgcgcacgccgaacagggtcgccacggtgccgttggtcaggggcaccgtggacagccacagcagccccatggccacgccgaaggcgtaggcgctgtagacgctcagcggcagccagaggaacagcacgatcactaccccgcgcaccaggtacagcgcggtcagcaggcgcggcttcgaccagcgcccgccgagccagccggcgatgtaggtgccgaacacgttgaacagcccgaccagcgccagcaccgtggtgccgacctgcgccggcaggtgctggtcgaccaggtaggccggcaggtgtacgccgatgaacaccacctggaagccgcagacgaagaagcccagcgccagcagccagaacccggaatgcgcgcaggcctcgcgcagcgcttcgccgaggctctgttcgtggccctgcagcggcaacgggcgatccttcatcagcccggccagcggcacgatcagcgccaccagcaggcccagggcgagcagggccgaggaccagcccagccagccgatcaggccgagggtaccgggcagcatggcgaactggccgaaggagccggccgcgctggagatacccatcgccatgctgcgctgctccgccggcactgcgcggccgacggcgccgaggatcaccgagaacgaggtgccggaaaggcccaggccgatcagcaggccggcgctcagcgacagcccggtggccgactgcgagagtcccatcaggaccagaccgagggcgtacagcaggccccccaccagcaccgcccgcgccgcgccgtagcggtcggcgagcgccccggtgaacggctgggccaggccccagaccaggttctgcaaggcgatggcgaaggcgaagacttcgcggccccagccgaagtcggcgctcatcggcgcgaggaacaggccgaagccatgtcgcacgccgagggacagggcgaggatcagggctccggacagcaggatccagaaggcggcacgcggcatgggtcgctccatctacgggtatatacccgctttatcgtgaacgaagcgcctcggcgagaggcttcgtcggttgtcagtccagtcgctccagttccgccagcaacgccgccaaggcgccgctgcgctcctcgccaaggcgcccggcgagacgccgctgcgcatcttcccaggccggcgttccgcgctccagggcatccagcccggcaggcgtcagctcgaccaggcggttgcgctggtcctcgccaccggtcaggcgcagcaggccgtcgccttccagcacccgcaggttgcgaccgagggtgctgcggtcgagtcccatggcttcggcgagttcggaaatgctcggccggtccaggcgccgcaggtgccgcagcagggaaaactgcgccaccttgaggccggtatcggccagcgcctcgtcgtagaagcgggaaacgctgcgggcggcgcgacgcagtttggtacagaggcattgggtcggtagcatggatgcgtgtatatacccgtacttctcgacggtcaagcggattgtccgaactgccaacgccgtctgttgcccctgccaaggccggacgccgggcgctggcctataactcgcgctgtcagcggcgaccgggagcacccggcgccctccatccatcgccgaggtagccatgcccgtttacaaagccccgctgcgcgacacgcgcttcctgctcaacgaagtcttcgatttccccgagcattaccgcaacctggtcaacggagccgaagccacgccggacatggtcgatgcgatcctcggcgaatgcgcgaagctctgcgaggaagtgatcgccccgctctaccacagcggcgacgaggaaggctgccacctggagaacggcgaagtacggacgccgaagggctacaaggaagcctacgaggcctatgtcgccggcggctggcagggcctctcgcacccggtggagtacggtggccagggcctgccgatgagcctcggcgcgctcaagcaggagatgatgggcaccgccaactggccgttctccatgtatcccggcctctccctcggcgcgatgaacaccctgatgcagcacggcaccgaggaacagaagcagacctacctggttccgctcaccgagggccgctggggcggcaccatgtgcctcaccgagccgcagtgcggcaccgatctcggccaggtgaagacccgcgccgaggccaaccccgacggtagctacgccatcagcgggacgaagatcttcatctcttccggcgaacacgacctgaccgagaacatcgtccacatcgtcctcgcccgcctgccggacgcaccgaagggcacccgcggcatttccctgttcatcgtgcccaagttccttcccggcgaaggcggcgcgctcggcccgcgcaacggcgtgagttgcggcgcgctggagaagaagatggggatcaaggcctcggccacctgcgtgatgaacttcgacggcgccaccggcttcctcatcggaccgccgaacaagggcctggaatgcatgttcaccttcatgaacagcgcccgcatcggcaccgccatccagggcgtggccaccgccgagctggcctaccagggcgccctcgcctacgcccgcgaacgccgctccatgcgcgcgctctccgggaccaaggaacccgaccaggtcgccgacagcctgatgcaccacggtgacgtgcggcgcatgctgctgacccagaaagccatcgccgaaggcggccgggcgctggtctacctggccacccagtacgccgaccggatgatccagggcatcctcagcaacgacgacgccgaatacgaacgctgggacgacaagctcggcttcctcacgccgatcctcaagggctgcctgaccgaactcggcctggaaagcgccaacctcggcatgcaggtgttcggcggccacggctatatccgcgaacacggcatggagcagatcgtccgcgacgcgcggatcgccaccctctacgaaggcaccaccggcatccaggccctcgacctgctcggccgcaaggtcctgctgatgacccagggcaaggccgtgcgcgacttcaccaggggcgtggcccggttcgccgtcgacctgctgaagaacgagccgcgcatgcgcggccgcgccctggtgctgctcaagctctgcgcccaatggaacctgctgaccctgcgcattgccctcaccgcgcgcaagcaacgcgatctggtgagcaccgccagccacgactacctgatgttctccggctacgccacgctggcctattcctgggccctccaggaagccgctgcgcgccggcgactgcgccagggcggcagcgagtcggcggacttctacaaggccaagatcgccaccagcgagttctacttcgcccgcctgcttccgcgcgccaagggccacgcggcggcaatggcgaagccgacgggttcgatcatggacctgaagagcgagcacttcgccttcgactgaggcgaccacccgcagcgcgcgccagcggagcctcagtctccgctggcgccagtcggggtcagcaacaacgcacgaacgtcgtcgagcatcgagtcccattcctcctggccaatgtccatcaggcggaagtagcgcaacatgaaagcgccctccaccgccaggaacgccaggcgcgcacggcgtccctcaggtgcggacaggtccaggccttccaaccggctgcgataccactggttgctgccctccaggtgctcgggagcctggatcagcgccgccatcagcgccgccgctttgctgctggacagctcgtccgaacgctgggtcgcctcggcatgtgcgcgaacccgcgtcagtggcgtcggctgcttccctgccaccgcttcgaacaggctgtcgtaggccttgccccagcgctcgaagatcgcgtcgatcagcgcatccttggtaccgaagcagtactgcacgccgcccttggtaatgcccatttccttcgccaccgcatcgatggtcaggccggccgcgccttcgcgggcgatcaccgcctcggcggcatcgagcaactggtcacggtcgatcgttcgtcggcgtcccatggctacctcttgagtttaaatccatacgtatgtatttatattttcacgcgcccgcccgtggcgcgcaattcccgttatccacggcgagcgatgaaccgttcgccacagaggttatcccatgttccggcagaaccgctggctggtcctggccatcgtctccagcgccctgttcctcatcatcatcgacatgaccgtgctctacacggccctgccgcgcctgacccacgacctcggcgcgacggccgcggagaaactctggatcgtcaacgcctatccgctggtggtcgccggcctgctgcctggcgccggcttgctcagcgaccgccttggccacaagcggctgttcctcgccggcctgccgctgttcggcctggcctcgctgtgcgccgccttcgcccccagcgccgcggcgctgatcgccgcccgcgccgggttggcggtgggcgcggcactgatgatgccggcgaccctgtcgatcgtccgccatgtcttccaggacgaacgcgaacgcgccctggccatcggcatctgggcctccgtcgcctctgccggcgcggcgctggggccggtggtcggcggcgtgctgctggagttcttctggtggggctcggtgttcctcatcaacgtcccggtggtggtcgtcgctttgttgctggcgctgccggccatcccggcctgcggcggccagtcgcggcgcccatgggacgccctcggctcgctgcaggtgatgttcggcctggtcggggtggtgtatgcgatcaaggaactcagcacacgcgccccggacttcgggctggccgtcctcgccgcgctcggcggcatgctctgcctgtacctgttcgtccgccgccagcgccgcgcccgcgaaccgatgatcgacttcgcgctgttccgcaaccggcgcttcgcccgcggcgtcgcggtggccctggtggcgaccatggcgctggtcggcatggaactggtgttcagccagcacctgcaactggtgcagggcctgacgccgctgaaggccggcctgttcgtcctgccgatcccgctggcctcgctggtggtcgggccgctggccggctggctggtgccgcgctggggcgagaaccgggtgatgtgcgcctccctgctgctcggcagcgccggattgctcggcctggccctgtcctaccagtccgccaccggagcgcaactggccagcctggtgctgctcggcgtcggcttcggcggcgcgatgaccgccgcctccaccgcggtgatgctcaacgtggacgaacagagttccggaatggcggccgccatcgaagacgtatcctacgaactgggcggggtgatcggcgtgaccctgctcggcagcctgatgagtttcgtctacgggatgtcgctgaggctgccctcggccgagctgccggcgcgggtccgcgacagcctcgacgacgccctgttggtcgccgagggcctgacgccggaggtcgcgtcgcggctcgtcgagcttgcccggcaggctttcgaccaggccttcgtcgccgtgctactggccgccgccgcgctgctcttcctcagcgccatggcggtcctgcgccagccgcgtccggctacagagccagcgccaccagcaccgcacactcggtaagttcgaccagcgcgccggcggtgtccccggtggtgccgccgaggcgcgcgaggaaacggctgcgcagccaggcgaagagcatcagcgtcaccagcaacgccagcaggccggccaggccgaacgccagggccaggccgaaactcacccccagcacccacggcaggctgcgcgccggcaggtgctcggcgatggcctggccgaggccgccggggcgcgcgtatggcgtggtcaggaacagcagcggcaggctgctgcgcgccagccacggggccagcggcaacaacccggcctcgccctggccgagcagcgccgccagggcggagaacttcaacaacaggaccagtaccaggaccaccaccgccaccgggccgctgcgcgggtccttcatgatcgccagggtccgctcgcggtcgcccagcccgccgacccaggcgtccgccatgtcggccaggccgtccaggtgcagcgcgccgctcagcgccacccacaggctcagcagcaaggctgcctgcaacagcagcggcgtaccgtcgagcgaccgcgccgcggcgtacagcacgacgccgatcagcaccccgaccagtggatagcagagcaccgcgcggccgaactgttccggcgtcggcatcgccgacaggcgcaccggcaggcgggtgaggaactgcaaggcgaccagcagtgagcgcaaggcttcgcgcatgactattccccttcccggcattcgtgccagcgatcatcgccctctccggcgcgcaggccgaacagtgcgccatgaccgacgtccacctgcagcaagtgctcgcgcggcaggccacgggcgcgagcgagcaacagacggatgacgccgccatgggtcaccagcagcacacgacggccggcatgacgctggcgcaggcgtcgctgggcggccagcacccgcgcctcgaactcggacagcggctcgccgcccggcggggtaaaggcgtagggatcggcccagaagcggccgagcgcctcgctgtggccgtccatcagggcggccgccgagcgcccctcccaagcgccgaaatgcagttcgcgcagatcgttttccagttccagctcgatcccctggcgctgcgccagttcctcggcgaaggcgcggcaacgttgcaatggcgagctgaccagcaggtcccagcgtccgccttccaccgccgtgcgcatctgcgcccagccacgcgcggtcaaggcgtcgtcgaggctgccgcggaaaccgccgccggactcggtttcgccatgccgcaggaggtccaggcgcaggctcatgccgggcggtccgagaccgccgcttcggcgaaggtcgccatccccgcgtgcagcgcgcaggcctggcgcagcagcggcactgccagcgccgcgccgctgccctcgcccaggcgcaggccgaggtcgagcagcggttgcgccgccagggcttcgagcacatgccgatggcccggctcggcaccgctgtgggcgaacagcagccagtcgcggcaggccgggttcaggcgcaccgcgcagagcgccgcgacgctgcagatgtagccgtcgaccagggcgaccatgcctttctgcgcgcaggccaggtaggcgccggccagcgcggcgatctccaggccaccgagacggcggagggtttcgaaggggtcggcgcgatgggcgccgtgcagggccagggcacgctcgatcaccgcggccttgtgcgccacgccgctggcgtccagcccggttcccggcccgaccagcgcgctcgccggcgcatccagcagcgcgcaggccatggccgccgccgcggtggtattgccgatgcccatctcgccgccgatgaacagctggctgccggcctgctcggcgcggcgcacgctttcgcgcccggcctcgagcgccagcaggcactgttcggcgcccatcgccggggcctcgacgaagttcgcggtgcccgccgccaggcgcaggtgacgcacgccgggcaaggcttccagggggaacgcggtgcccaggtcgaccacctccaggccggcgccgagttcgcgcgccagcacgctgatcgccgcgccgccgcggacgaagttgcgcagcatctcgccggtgaccgcctgcggataggccgagatgccctcggcgactaccccgtggtcgccggcgaagaccgtcacccagatcctctccaggctcggtcgttcgcgcccctgcaacgccgccaggtcgatcgccacttgctccaggcggcccagcgagccgcgtggcttggtcaaccggtcctggcgttcggccgcgcgccggcgcatctgcgggtccgcctcgcggcaggtgtcgcgccaccattgcagactcatagcggttctcctttcaacggcatgggcaggccggcgacggtgaaggtcacccgttcgcagcgttcggcgatggcctggtgcagccagccggcctcgtcgacgtagcgccggctgagttcgcccagcggcaccacgccgagcccggtttcgttgctgaccaagatgatccgtcccggcagctcgccgagacattccagcagcgcctcgcgctcgccgtcgagacgctggggatcgtcgcagagcagcaggttggtcagccacagggtcaggcagtcgaccagcaggcagcgtccggcctcggcctcgctgcgcagcgtcgccgccagcgccagaggctcctccagggttcgccagtgggccgggcggcgcgcgcggtgctcggcgatgcgccggcccatttcgccgtcgccggcctgggcggtggcgatgtagctcaccgccagcccgctctcggcggccaggcgctcggccaggcggctcttgccggaacgggcgccgccaaggatcaggtcacgcatggggttctccgcagagggcgagcaatcgcccggtatccaggtggcgctcgaccaggtcggcgagccgctcgatgtcgcgttcgcgcaaggcctggtagtccaccgcctggacctcgcgcaggccggcccagcgcagcagcgccgaacaggccgcggtggattcgaacaggccgtgcaggtaggtgcccatgacgttcccgtcgacgctgcgggcaccatccgcgcggccatcgtcgagcaccaccgccggccgcgccagggcctcgccacgggtgatcccggcatggatctcgtagcccgacagcggcgcatcctccaggctcaggcggccctgtacgttgcgcaattgcttgtccgcctcaagggtcgtttccaacgccagcaggccgaggccagcgctgctgccggccgcgccttccaggccgagcggatcgtgcaggcgctcgccgagcatctgcaggccgccgcagatccccagcaggcgaccgccgtagcgcaggtgacggaggatcgcctcgtcccagccacgctcgcgcagcgccgcgaggtcggcgcgcacgctcttcgagccgggcaggacgatcaggtccgccgacggcagcgcctggccggggccgacgaagctcaactcgacctgggggtgcaggcgcagcggatcgaaatcggtgtggttgctgatcctcggcagcaccggcaccaccaccttcaggcgcggcccgaccttggccgcctggcgcgtgtcgatggcgtcctccgcctccaggtgcaggtcgctgacatagggcagcacgccgagcaccggcttgccggtgcgcgcctccagccagtcgaggccgggttgcagcagggcgatgtcgccgcggaagcgattgatgacgaagcccttgacccgctcccgctccgagtcggagagcagttccagggtgccgaccaggtgggcgaagaccccgccgcggtcgatatcggcgaccaggatcaccgggcaatccaccgcttcggcgaagcccatgttggcgatgtcgttggcgcgcaggttgatctccgccggcgagccggcgccctccaccatcaccacccggtaggcggcggcgagccgcccatgggaagccagcaccgcttccatcgccacgcgcttgtagtcgtggtaggcggcggcgtccatgctggtcaccgcgcggccatggatgatcacctgggcgccgatgtcggtgttcggcttgagcagcaccgggttcatgtcggtgtgcggcgccagccggcaggcctgggcctggaccgcctgggcgcggccgatctcgccgccgtcggcggtgaccgcgctgttcagcgccatgttctgcggcttgaacggcaccaccgcgacgccgcgccgggccagccagcggcacagcgcggtcaccagggtgctcttgccggcgtccgaggtggtgccctggaccatcagggtccgcccgcgatcactcatgagcaggctccttgaagccgagcagcgcggcatcgagccgggcccaggcggcctcgtcggcgggcaggccgaggcgcaggctggccggctgctcgaattggcgggtgaggatgccgcgccgcgccaggtagtcgtgcaacgccgcgcagcgtggatcgaccaggcgctggaacagcgcgctgccgcccgccggcggccagccgtggcggcgcagcagttcctccaggcgctggctggcggccagcaggcgctcgcgctgctggcgctgttgctggcggtcgcgcaaggcgctctgggccacatggcgcaccgggccattgaccgtccacggaccgagctgctcggccagcgcctgcaacagcggccgttcgccgagggcgaagccgagccgcgcaccggccaggccgaagaacttgccgaacgagcgcagcacgatcaatccgggtcggttgctacaggccgccaggctcgactgcggggtgcagtccatgaacgcctcgtcgaccagcagccagccgccgcgacgttgcaggcgggcatgccaggccagcagctcggcgggctcgaagacccgcccggtggggttgttcgggttgaccaccagcagcacgtcgaggctgtcgagatagggctcgacctcggcctcgccgatctcccgcaccaggtgcccggcctggcgccaggcgtgggcgtgctcggcatagcacggcgacaggacgccgacccgcccgccccgccgcaaccttggcagggcctggatcgccgcctggctgccggccagcggcaatacccgttcggcgccgtagtagaggcaggcggcggcttccaggccgtcgtcgctctccggcaggcgggtccaggcctgctcggggatcgccggcagcggaaacggccagggcgcgatgccggtggacaggtccagccagtccgccagcggaatgtcgtagcggcgcgccgcctcgcgcaaccgccctccgtgttcaagcatgcagccaccccatggcccagagtccggccagcaccagcagccagagcagcacgccctggcgcaccagcgccagggcccgatagatgtcgcggccctgcggctgcgggccgctgccgaggagcggccgctggtgcagctcgccgtggtagatcgccgcgccgcccagggaaacccccagcgcaccggcgccggcggccatcaccgggccggcgttggggctgtcccattgcggcgcctgctcgcgccagcagcgcagggcctggcgggtgtcgccgagcagcgcgtaggtcagcgccaccagccgcgccggcaggtagttgaggatgtcgtcgatcttcgccgcggcccagccgaagcgctcgaagcgcgcgttgcggtagccccacatcgcgtccagggtattgctcaggcgatacagcaccacccccggcgcgccggccacggcgaaccagaacagggcggcgtaaaccgcgtcgctgccgttctccagtaccgattcggtggccgcgcgggcgaccccggcctggtccagttcgcgggtatcgcggctgaccaggtagccgacacgtcgccgcgcctcgtccaggtcgccggcgcgcaaggccagcgccaccggttcggcgtgctcgccgaggctgcgcaggccgagcgcggcgtacagcgccagggcctggaccagccagccgaggtagggaagttcagcgagcgcccaggccagcagggtcagcggcagtaccgcgaggacccaggcggtcaccccgtggctgcgccagccgaccccgggatcaccctcgccggccaggcgcgagcggttgaaacggcgctccaggcgatcggccaggcggccgaaggcgaccagcgggtgccagccctgcggctcgccgaagcgcgcatccagcgccacgccgaggatacccagcagtgcgctcatgctcgctcgccccaacggttctggtagaccagctcggccagcggacgcggttcgctccaaccctccagcgccagcatcggcgccgggtagaactccgccaccgggcccaggcagagcaccgccaccgcctcgctgccgggcggcaggccgagcaactcgcccagcgcggccggatcgaacaacgatacccagcccatccccaggccctcggcgcgactggccagccagaggttctggatcgcgcaggcgagcgacgccaggtccatctgcggcagggtccggcgaccgaacacatggcgttcgcggtcgtccatcagggcggcgaccagcagttcggcgcaatccagcacgccctcgaccttgagccgcatgaactcgtcggagcgctcgccgagggcttcggcggtacgtccgcgttcctcctcgaccagcccgtggatggcccggcgcaacgccggctcggtgatacggatgaagcgccagggttgcatcaggccgacgctgggcgcctggtgcgcggcctccagcagccgcgcgagcagctccggcgccacgctgccgccgctgaagtggcgcatgtcgcggcgctcggcgatggcccggtagacggcggcgcgttccgtggcgctgaaggcgtgagaagaatcggacatgtcagtcggcgtctcgcgcgggcgccagcaacgcggcggcggcctgcgggttggaaggcaggtagaaatggatataggaagccgtcagccggccaagacggaacaccgcctccgccgtgttccggccgttcgggcagacgccacgggccagaggctcgacggcgcagtcgagggtcgagtgatggaaggtatgcccgcgcagccgcccttccggcagctcgacctcctgcaaggccagggcggtcaggcgcttctgcaggcgcgcccggcccggcagcaggccgagcagttcgccgcgctcgccgtcggcgtcttccaggcagtcgagcaggtagagcatgccgccgcactcggccagcagcggcttgccggcggcatggtgggctcggatcgcctcggccatggcgcgattgccctgcaggcgccccaggtgcagttcgggatagccgcccggcaggtacaggctgtccacggcgggcagcgcctggtcctgcagcggcgagaagaacaccagttcggcgccgagttcgcgcagcaggtcgagattggcctggtagaggaaggcgaacgaggcgtcgcgggccacgccgatgcgcacgccttccaggctgcgttgcagcggcgccggagcgggcacctcgaaggtcaccggctccggcaggtcggtctcggcgctggcccgcaaggcgtcggcggcggcgtccaggcgcacatcgagatcggccagttcctcggcctggaccaggcccaggtggcggctcggcaattcgaattcggccgagcgcggcagaccgccgaaccagcgcatgccgggcggcaggcaatcgcgcaggatgtcgctgtggcgctggctgccgacgcggttgccgagcactccggaaaacggcaggtccggctggaaatgcgccagtccgtaggccagcgcgccgaaggtctgggccatcgccgcgccgttgatcacccccagcaccggcacgccgaaacgccgcgccaggtctgccgccgaggggttgccatcgaacaggcccatcaccccttcgatgaggatcaggtcggcctcgccggcggcccgcgccagcaggcgtcgcgcttcggcctcgccgaccatccacaggtcgagctggtagaccggcgcgccggaggcgcgagcgagaatcatcgggtcgaggaagtccggtccgcacttgaacacccgcacccgtcgcccctggcgcgcatgcaggcgggccagagcggcggtgacggtggtcttgccctggccggaggccggggcggcgatcagcagggccggacagcgtgcctgggtcatgggcgaagcgtctccgcgcatggcgcgggcatcagaactccactcctttctgcgccttgatcccggccttgaacgcgtgcttgaccaggctcatctcggtcaccgtgtcggcggcctcgatcatccccggctgcgcgccgcgaccggtcaccaccacatgctgcatggccgggcgcgcctggatgtcggcgaggaccctgtccagttccaggtagccgtgcttgagggcgatgttcagttcgtccagcaccaccaggccaacgtccgggtcggccagcaattgcgcggcgaccttccaggccgcctcggccttggcgatgtcgcgctggcggtcctgggtctcccaggtgaagccctcgcccatcacgtgatagctgacttcctcggggaagcgccggaagaaggcttcctcgccggtgctggcggcgcccttgatgaactgcacgacaccgaccttcatgccatggcccagggcccgcgcgaccatgccgaaggccgagctgctcttgcccttgccgttgccgctatgcaccaggagcacgccgcgttcgtcgcgggcctgggcgatcttctcgtcgaccacggccttcttgcgctccatccgctcgcggtggcgctggtccttctcgggggattcgttcatcgtcgatcactccttgcggcgacgcggccgcgccgtcgcctcgttcattcgaaatacccggcctcacagagcctggtagcgcacgctgaggtagaccgcctggccaggctggttgtagccatacgcggtttcgtagtcggcaccgaacaggttggcgatccggccctgcagacgccattcgtcgttcagccggtactcgctgcgcaggtcgagggtggcgtagccgcccaggcgcaccttgttggccgggtcatcatagcgtcggccttcggcgtgcacgctggcgcccagcgaaagacgctcgaagcgccggtccagttccaggttgaacatccgccgcgcccggcgcggcagctcgttgccgtcgttgacgccgccggaacggttttgcgggtcgaggaaggttgcgttggcgttccagtcccagcccagccactggctgccgaggaccagttcgacgccacggatgcgcgcttcgtcgatgttgttcggctgcccccaggggcgccccggcgccggacgcggatcgttgccgatcaggtcgtcgacgttggtacggaaggcatttaccgcccagtgcccccagccatgcgtaccgctcagcccgacttccaggctgcgcgaagtctcggcgtccaggtcgggattgccgtagtcggggtagtagagttcgttgaaggtcggcgccttgaacgccgtgccgtagctgacggtgaagcgcagcgcgtcgctcagcgcgtagccccaggcggcgctgccggtgtcgtgcacgccgaactgctggttgtcgtcgcggcgcaggctcagttgccaatcctggcgaccgtactggccgaggtactgggcgaaccagcctttgttcagccgcgagtcgacgctgaaggcttcgctgctgctgatctcgtccttctgccagtcgtagccgagggtcagcacatggccttcggccagagtcaggtcgttctgccaggacaggctgtcgcgacgggtatcgaagcgcgagtagaaacggccatcctgataggcatcggccttgtcctcgctgcgcccggcctggagggtcaccagccagggatcgaacggagtgaagcgggcacggccgccgaccaggttctgctcgccgtcggcgttggcattgacaccggagttgccgaagacctggtcatagtcgttgtgcgacttggccctcagcagggtaccgtcgagttccaggccattgtcgaagcgatagccgccgcgcaggttgccggacaggttgcggtagccgtctcggtctggctcatagcccgcagtaccggcgcgcttggtattgatccccgccgtatcgaagctgctcaccccgaggctgtaccagccgttgccggcgccgccgctgaccccggcgctgccctccagggtctgatgggtgccgtaaccggcggagaagaacggcttggcgccctggccgtcgccgcgccgggtgaagatctggatcaccccgccgatggcctccgagccgtacaggctggaacgcggcccgcggaccacctcgatgcgctcgatcagctccaccggcaagtcctggaacgcggtgaggccagcgctggccgagccgaccttgatgccgtcgatcagcaccagtacatggtcggactcggtgccgcgcaggaacagcgtggtgttcttgccgaaaccgccgttgttcgccagcgacacgccgggtacctggcgcaacagctccggcacgctgcgcgcctggctgcgctcgatatcctcgcggtcgatgacgctcactgccgccaggctctgggaagcggtctgggcggtacgggtggcggtcaccacctggtcggcaaggctgaccggttcggccaggctcagggaagacgcgccgcacagcgccacggctgccggggtcaggaaaactctgttcatgctctgcgctgctccgtcgctctcacccgcgcgacctgggttgaggcagacggaggacgaagcgacggcaggagacgtccgacagcgccctccgcgatgccgtgggtgcgtcaggccggtctccgggctcgcgagcgaagcgctggacgcttccagccgcgccttcccatgccggagcacagtggtcatcgagcggctgtctgattcgcctaccgttgcgggggcagcgctggcctggttccgacggaacgcaccagcttccctgtttcaccccttgcggggcacctgtcgcaaggcgcgcagcttagtggttcggggcttgcgcggtcaatgtgggcggccaccgcagaactagcgcccggctccggggagcgggtccgtgcgcagcgccgtcccggccggagcatggctgcggcaccactgccgccaggtggcctgcaactgcaccagcgcggcgccggccagctcgccgcgttcgctgccggccagcgggctggcggccagggccttgagcaggcgcgcggtcggcgggtcgagggcgtgttcacgctcggcccgcgggccatcgcccagcagcgccaggcgcaggcgccgcaggtaacggtcgcgggcctgcgccagggacgccgggacctcctccaggcactgccgcaggtagagcagctcgtcgccgaagtcgagtcccatcaggccgtccgaccagggctggcggcgcccctccggcaaacggtcgtagcgctgcgccaggcggatcaggcgatccgcggtgcgcccgccgaaccaggcctcggcctgcgccggcgagcgcagggtgagccgcgccaggtcgccgagggtggcctgcagcatgcgccggtaatggcgttcgcccggtcgcaggctgaccaggttgaacaccagcacggcgaaggccaccccgagcaccgtcgacagggcgttgttgaggaagtgcgcgaggtcgtagctcatgctgttgctcggcgcgacgttcttcacgaagaagatgcagaacggcgaggcgatcccggccaggctcgcccggttcacgcacagcgcggcgaagaacagcggtacgcccaggcccaggcagagcagcgggaagccgtccacgccgggcaggtagaacagtgcgacgaagccggccagcgggatcgacaggaggatcccgcgaaggaagttcaggccggcctgggccgggttgtcgcggctggcgaagagactcagcaccaccccggtgatcgacaccgcgcccaacccgctcggccaggcgctggccagccagaacgcagccacgcagaggaacgccagggcgctgcgcaggccgaacagcacgccgcgctcgatgtcccggtgccaggcgatggcgccgggcgcctggcgggtgggcgcgccatagaccagcgcctcgacgctgcgcccggccgccctcgcctcgccgagcaggcgttcgaggcagaccaggcacaggtgcaactgtccatgcgccgcgtccagcgccaggcgcaagcgctgccggcaggcctcgaactcggcctggcggccctcgcgcaacagtgcctcgagttcttccagccagggctgcaaggcgtgcgcgctggccggatcgagcagcctccgctcgcgagccaccttgcgcgccgcgcgcagcaggccgagcaggtcgaggcctagcacgcgcaaggcctgggaacgggcgcggccgagcgcgccctcgaaccaggcgtggtcgcgctgggcgtccgccgcggcgatccgccccagcgccgcgagcagctcgccgcgttcgtcggcgccgcgcagctccgccgcggccgcctgcaagccggcctcccaggccgccttgccctggttcgccaactggcgttccaggcgccgcggccagagcagcacattcaccagcgccgcgcagaggatgcccaggccgatctccgagcagcgggccaccgcctggtcgaacaccgtcgccggatcggcgctggccggcagggcgacgatggccgcggtgtagccggccaggacgaaaccgtaggacgcatgattgtgcagcagcgacgcgccggcggtgcagaacgccagccagagggccatcagcaggaggaagggcagcgatgcctggccatagagtgcgaccatgccgatggacaccagcgcaccggcgcaggtgccgatcaggcggaacatgcccttggccaggaccatgccgctatagggctggctgaccacgaacaccgtcatcaatgcccattgcggctgctccagctccaggctgaaggccaggtacagggccaacccgccggccagcagggccttcacggcgaactgcagttcgtgcagacgcgggcacagcagcacctgcaccaggtcggaggaaaagaaggaaggcttggccatcgcggacgccccgaaatacatgagcgagcgaattattagcaagctaattttctattgtccagcctctccgcgaactttccggaagagcgtttcgccctgcgaaacatgcgccacggaggcccactggagccgaccaacacgcctgcgcagaaggcgccaaccggcagcggcacgcgccaagcgttcgtatacaatatcccgcacgttcccaacgccatgcaggttgtcccgcttgcctctctccatgctcaacgcccctaacctgggcatcgccccttcggcctccgagatcatcgccaagcacctgcgcgaagcgatcatcgccgggcatttcgccgaggacgaaccgatccgccaggacgacatcgcgcaactcttcaatgtcagcaagattcccgtccgcgaggccctcaagcgcctggaggcggaaggcctggtgctgttccagcgcaacaagggcgcggtggtgacgcgtatttccgaaccggaactggcgcagatgttcgaagtgcgggtgctgctcgaggcgcaggcgatccgcctggcggtgccgaacatgaacgagaccaccttcgcccgcgccgaggcgatctgcgccgacttcgtcggcgaagacaacgtcggccgctgggccgaactcaactggcaactgcacgcctgcctctacgaaccggcgcagcggccgttcctggtcaacctgatccgctccatccacgacaagctggaacgctacctgcgcatgcagatgagcctgtccgaaggcaagcagcgcgccgaccaggaacaccgcgagatcgtcgccgcctgtcgcgccggcgatgccgaacgggccgcggcactgatcgaggcacatatcgtcggggtctgccggaccctctacgaacacctgccgaaccgcccggccagcacctgagccgggccatcccggctatgccgctttcgtcatccgcctgagcgaaaaccctcaagcgccccgccccgccgaaacgccaccctgtggcgcattccccggcacaggcgagggccaccatgcaacgcatccgcatcatcgattcgcataccggcggcgagcccacccgcctggtcatcggcggttttcccgatctcggccagggcgacatggccgagcgccggcgcctgctcggcgagcgccatgacgcctggcgcgccgcctgcatcctcgaaccgcgcggcagcgacgtactggtcggcgccctgctctgcgcaccggtcgatcccgaagcctgtgccggagtgatcttcttcaacaacagtggctacctcggcatgtgcggccacggcaccatcggcctggtcgcctcgctggcacacctcgggcggatcggtcccggcgtgcaccgcatcgagacgccggtcggcgaggtcgaggcgaccctccacgaggacggctcggtcagcgtgcgcaacgtgccggcctaccgctaccgtcgccaggtcagcgtcgaagtgcccggcatcggccgggtcagcggcgacatcgcctggggcggcaactggttcttcctggtcgccggacacggccagcgcatcgccggcgacaacctcgacgccctcaccgcctacaccgtcgccgtccagcaggcgctggaagaccagggcatccgcggcgaggacggcggcgccatcgatcacatcgaactgttcgccgacgatccccacgccgacagccgcaacttcgtgctctgtcccggcaaggcctacgaccgctcgccctgcggcaccggcaccagcgccaagctggcctgcctggccgccgacggcaagctgctgcccggccagccctggcgccaggcgagcgtgatcggcagccagttcgaggggcgttacgaatggctcgacggccagcccggcgggcccatcgtgccgaccatccgcggccgcgcccacgtcagcgcggaagccaccctgctgctggcggacgacgatccgttcgcctggggcatccgccggtgaacgccgaggtcatcgtggtcggcgccggcatcgtcggcagcgcctgcgcccatgaactggcgcgtcgcggcctcgacgtactggtgctggacagccgccgcggcggtgccaccgcggtgggcatgggccatctggtggcgatggacgacaacccggccgaactggccctcagcgactactcgatccaggcctggcgcgcctgggcggcggagttgccggaggattgcgcctatcgcggctgtggcaccctctggctggccgccgatgccgccgaactcgccgaagccgagcgcaagcgccaggccctgctggccgccggcgtcgcctgcgagatgctcgacgccgcgcgcctgcgtgacctggaaccggtcttgcggccaggcctcgccggcgccctgaaggtgccgggcgacggcatcctctacgcgcccaacgcggcgcgctggctgctcgaacgagccggcccgcgcctgcgtcgattgcacgccgaagtcagcgaagtggacggcagccgcctgcgcctggccgacggccgctggctgagcgccgaggcactggtgctggccaacggcatccatgccggcgagctgtgcgcggagctgccgatccgcccgaagaaaggccacctgctgatcaccgaccgctatcccggcaccctccgccatcaactggtggaactcggctatgtcagcagcgcccacgccagcagcggtacctcggtagccttcaacgcccagccgcgccccaccgggcaggtcttcctcggctcctcgcggcagttcgacacgctcgacccgcaggtggaaggcccggtgctggcgcgcatgctgcggcgtgccctggactacctgccggggctcgccggcctcaatgcgatccgtgcctggaccggcttccgcgctgccactccggacggcctgccgctgcttggcgagcacccggcgcagccgggcctgtggctggcggtcggccacgagggcctgggcgtgaccaccgcgccgggcagcgcgcgcctgctcgccgcccagttgttcggcgaaacgccgccgctggatgccacgccttatctgccgcaacgcttcctctccagctccaggagtgcccgtccatgatcgaactgttcatcgaccggcgtccgctgcgggtcgccgtcggtaccagcgtggcggccgccctcgccctcggcggcgacggctgctcccgcagcgcggtcggcggcgggcggcgcgcgccgttctgcggcatgggcgcgtgccaggaatgccgggtattgatcgacggtcggcgacgcctggcctgccagaccgtctgccaatccggcatgcgcgtggagacccaggcatgagcgccgactacgacctgctgatcgtcggtgccggccccgccggcctggccgcagcgctggccgccgcgccgagcggcgcgcgcatcgccctggtcgacgacaacccggccgccggcggacagatctggcgcgacggcccgcgtgccagcctgccgccgcgtgcccatcagatgcgccaacgcctggccgggcaggccaatgtcgagcacttcccggcgacccgggtggtcgcctgcggtcccggcaggcgcctgttgctggaagacccgcaacgtggctggcaggtcggctaccgacgcctggtcctctgcaccggcgcccgcgaactgctgctgccttttcccggctggaccctccccggcgtcaccggcgccggcggcctgcaggcgttggccaagggcggcctgccactggccggccagcgcctggtggtggctggctccggcccgctgctgctggccagcgccgccagcgccagccagtgcggggcgcgcctgctgcgcgtcgccgaacaggcgccggcgagaaccctggccgccttcgccgtacgcctcccgcgctggcccggcaagctgtggcaggccgccggcctgttcgcccgtagctaccgcgccgacagctacgtgctcgccgccctcggcgaggagcgcctggaagccgtgcgcctgcgcgaaggcggtcgggtccgcgagatcgcctgcgaacgcctggcctgcggcttcggcctggtgcccaacgtgcaactcggccaggccctcggctatcgcctcgacggcccggcgctcgccgtcgacgaatggcaggccggcagcctgcccgaccactacgccgccggcgaatgcaccggcttcggcggcagcgaactggccctggtggaaggcaccatcgccggccatgccgccgtcgacgagcgcgacgcggctcgccgcctgtggccacgacggcgacgctggcagggcttcgccgacaccctggcgcgacacttcgccctgcgtgccgaactgcgtcaactggcggaggcggataccctggtctgccgttgcgaagacgtccccttggccgcgctggccgggcatgccggctggaccgaggccaagctgcacagccgttgcggcatgggcgcctgccaggggcggatatgcggcagcgccgcgcaattcctgttcggctggacgcctccggcgccgcgtccgccgttcagcccggcgcgcctggagaccctggcctgctggcagggcgacgccggctagcgacgctcggcgcgatacagccagccgaggccggccagcgacagcagcaggccacccagcagcatgggtgtcagcggctcggcgaacatccagtgcgcccatagcagggtcagcgccgggctcaggtacagcgccgcgctgccaccctgtgcggaaagatggcgcaggcccagccagtacaggccgtagccgccgaaggtgggcagcagcaccagccaggcgagcccgaacaggaatccgccggacagcggcggccgcaggctaccctccgccagcgccaggccggcgaacgccggcagcgcggcgccgatctgcacgaacagcaccacggccagcgatcccggcgcatcgtcccagcgcttctgcaacagggtggccagggccagcgctagcatgcccagcagcggcaggccgtaggcccagcccggcgcccgccccagcgccagcgccgcatgcccggcccagagcaccccggcgacgcccagggcgatccccggccactgccccggccgcgttcgctgccccggcaggaccagcgccagcaaggccaccagcagcggcaacaggtcggccatcagcgccgccacgcccggcgagacgccgagttcgatggccttggcgatcggcgcgatgtagcccgcgtaggccaacgccccgatcagcgcctggcgccgccactggcgcgccgacaaccggcgcagcccggcccaggcgaagggcagcagcagcgccaggcaaacggcgaagcgccagaagctggtgaggaacaccggcgcctgttccatggcatagcggtagccgacgaagccggaactccaggccagtaccatgcccagttgcacggccagcaggcgggtcgccccgggcatcgctcgcggggtgcaggtggtcacgcgcatcgctcgcctccgtcggtcaggttcgagtcgaggctaggcggcctccgccgctactatcaaacgaaactatctgcaccagtcatgcaggaaatcggaaccatgagcgccaacctggatatcgagctgctgcgtaccttccatgccatcctgcgcttcggccgctttctcgccgcggccagccacctcaaccgcagcccctcggcggtgagcacccacgtccggcgcctggaggaactggccggcggccggctgctcgagcgcgacaaccagtcggtgcggctgaccccgctggggcagcggttccagcgccagaccgccgagctgctggagacccacgaccgcgtgctcgccgggttgcgcagacgggaagagccgctgcgcgtgcgcttcggcatttccgaggaatacgccggcaagctgctcggccgcctcctgccacgcctcggcgcggaactgccggcgctggagctggaggtgctcaccgacgccagcggcaggctggccggacgcctgcggcgcggccagctggacctcgccctgctggtgcaagcgcaagacgaaaccccgtacggcgggcactcccgcgagatcggcggcacccagccggtgtgggtcgccggccacggcctgcggatcgatccgcaacgcccgctgccgctggccctgcacggccagggttgtccctatcgacaggcgctgctggaagccctcggcgcgacgggccggcgctggcgcacggtggtcagcagtcccggcgcggcggcgctggaagcggccatcgaaggcggcctggcgatcggcgtgatcgaccgtgcgcgggtcggcccgacgatgcgcgtgctggggccggcggagggcttcgccgaactgcccgcccaccgcattcgcctggccttcgccccgggagagcggccgccggcgctggagcgcctcggcgaactgatcgccgaggagttccggctctgagccgctacagcgccgggcgctagacccgcaggcggtggccgtctgtcagtttccggcagcagtcgctcactgcgcggcgatgctttcccgttcacgccactcgcgcagcaacgcctggcgccggcgccgccctcgatgtgcgcgccctgctgtcgcaggatggcgatatcgcggtagagggtgcgcaggctgatccccagttcgccggcgagcacatgcccggccaccgggtaacggtgccggcgcagaatctgcagcaggtcgagcaggcgctggctacgggacagggcgccgactcacagttgctccaggcagtcgcgggcgtggtcgtcgagggggacgaagaccagcaggcgatcgccgttcttcggcgccgaccaccagttggtctgctgcagttcgaattcgccgcagcgcgcatgacggaagcgcttgagctggttttcgatacccatcacctcgttgcgccgccagatctcgcggaactccgccgaagcctccaggcagcgctgcaactgccgctcccacagcggatcgcccatgcgctcgaccattgccgcgcggaagaagccgaccatccgcggcaacgcctcctcgcggttggccatgcagtagcgccagcgctcgtgggtcagcgccaggtagatgcagttgcggtcttcctcggggatctccgccaggtcgatgcccaccagccggcaataggcgcggttgtagccgcggatgtcgaaacgggcgttctgcaccatggccggcaacgggtcgagggcatcgaggatggcttgggtggcggccgaaggcttctcgcagaccacccgccgcgccgaggtcggcgcggccagcccggcgaggttgaacaggtggtgggtttccgtctcgttgcacagcagggcccgggcgatggctccgatcacctgctccgaggcgcgtaccgcgcggccctgctccagccaggtgtaccaggtcacgccgaccccggcgagctgcgccacctcctcgcgacgcaggcccggcgtgcgtcggcggccgaggcgggaaatgccgacccgctgcggctcgatgctttcccgccggcggcgcaggaaggcccccagctgttcggcgcgggacggctgcgcggggctttccgcagcgtggctggcaggggcgtcgaggggcatggcgaagtcctccggagggcagacgggtagcgccaataccaggataagcaagaactggtaccgggttagccagaagcgcatgctgccagcccactcccttccgcacaaggactccgcccatgcccagcaccgtctcgtcgtcgcggctcggcctcgccgggctctgcatcctgctggcggggcaactgttgccgatgatcgatttctccatcgtcaacgtcgccctcgacgccctcgcccattccctcggcgccagcgaaaccgaactggaactgatcgtcgccgtctacggcgtggccttcgccgtgtgcctggcgatgggcggccggcttggcgacaactacggccgtcgccgcctgttcgatctcggcgtcgccctgttcgccgtcgcctcgttgctttgcgggctggccggttcggtctggctgctgctggtggcgcgcgccctgcagggcgtcggcgcggcgctggtcgtgccgcagattctcgccaccctgcatgtcagcctcagcggccacgcgcattcccgcgcgctggccgcctacggcgccatcggcggcctggccttcgtcgtcggccaggtgctcggcggcttcctggtctccgccgacatcggcggcctcggctggcgcagcgtgttcctgatcaacctgccgatctgcctcggcattctcctttgcagccgccgctgggtaccggagacccgcgccgagcatgccgcccgcgtcgacgcgccgggcaccctgctgctcgccgcgctgatcctctgcctgctgctgccgctggctctcggcccatcgctgcactggtcctggccctgcgccctgctgttggcggcggcggtgccgctgctggcctggctgtggcgcaccgagttgcgccaggaacgccgccaggcctggccgttgctgccgccgtcgctgctgcgcctgccgagcatccgcttcggcctgttgctggcgatcctgttcttcgcctgctggagcggcttcatgttcgccctcgccctggccctgcaggccggcgccggtctctcgccggtacaggccggcaatgccttcatcgccctcggcgcctcctacttcgtctcggcgctgctcaccgcccgggtggcggcgcggatcggcccggtacgcctgctgctgctcggctgcgtcatccagatgtgcggcctgctcggcctgatgctgaccctgcaacgggtctggccgcagccgggcatcctcaacctggcgccggcgaccctggtgatcggcttcggccaggcgttcatcgtcagcagcttcttccgcatcggcctctcggaggtgccgaccgcccaggccggcgccggcagcgccatgctcgccaccgtccagcaggcctccctcggcctcggctcggcgctgctcggcgcggtgttcgcgcacaggctggagcgccatggcgactacctggaagcgacgcagacgaccctggccgtcgagttcgtcctgatgacgctgctgctcggcgccacctgcctcttctacctgcgccgcgtgcgcacggtgccattgcgctgcgactcgccgggcaactgaggcgcgcggccgggccctgttcccggccgccggcgccccgtatgctggcgcggtcccccagccaggccttcgccccgatgcacgacctgctcgccgccccgccccccgccgacctcgccagcctgctggccagcctgcgccaggtcgaggcgctgctcgacgccatgcccggcgtggtgttcttcgtcaaggacgagcgcgcccgctacgtcctggtcaaccgcaccctggcacgccgctgcggcgtgaaggagaagaccgaactgctcggccgcagcgccgacgaggtcttcccttccagcctcggtccgctctatgccgagcaggatcggcgcgtgctgcgcggcggcgcgacgctggagaaccagttggagctgcacctctatcccggtcgccagccgggctggtgcctgacccacaagcaggcgctgcgcgatgccgacggggcgatcatcggcatggccggcatctcccacgacctgccggcggcgcagtcggcgcacccggcctacgggcggctggcggcggtggatgcgcatatccgcgagcactacgaccagccgctcagcctcgccgatctcactgccatcgccgggctctcggtggcgcaactggaacgtcactgcaagcgcatcttccagctcaccccacggcagatgatccacaaggcgcggctcggcgccgcctcgcaactgctcgccggcgacgcgccgatcaccgagatcgccctgcgctgcggctacaccgaccacagcgccttcagccgccagttcaaggcgctcaccggactctcgccgagccagtaccgcgagacccatcgccagccccgaaaagcgtaacgcctcgccccgccacggggcggcggtagcaatcctgctcccttttgtaacaccgccggccgcgcccgagcggggcgcagtccggcgcggcctggcacagcgacgcgccagccaaagcggtcgcgctccagcgaaaggttttttatcgccgtcggacgaggttctggcacagccattgctcacttaaaatatcgtatacgaaatcacaaatacgggatttgccgccctcccactcaaccgcatcgccagaggcccccatgaataccaagaagacccttgccctagccctcaccgctgccctgggctgttccctcgccggtctcgcccaggccgacaagctcgacgacatcatcgagtccggcaagctgcgctgcgccgtcaccctggactttccgccgatgggctcgcgcgatgcacagaacaacccggtgggcttcgacgtcgattactgcaacgacctggcgaaggccctggacgtcaaggcggagatcgtcgagacgccctttcccgaccgcatcccggcgctggtgtcgggtcgcgccgacgtgatcgtcgcatccacctcggacaccctggagcgggccaagaccatcggcatgagcatcccctacttcgccttcgtcaaggtggtactgacccgcgaggacaccggcatcgccagctacgaggacctcaagggccgcccggtcggcggcaccgccggcaccttcgaggcgctggccctggagaaggacagcaaggcctggggcgacgccaagggcagcttccgcgcctaccagtccgaggccgacaccgccctggcgatcagccaggggcatatcgacgccacggtcgtctcttccaccgtcgccgcctcgtggatcaagtcgggcaagtacaagggcctgaagatcgccggcgacgcgccctatgacatcgactacgtggccctcggcgccaagcgcaacgaatacggcctgctcaactacctgaacctgttcatcaaccagcaggtgcgcaccggccgctacgccgagctggcgcagaaatgggtcggcggcacggcgccggagctgaccaccagcgcggtctaccgctgaagccgagggcgcggtccgccgccgggccacgccgtttccccccgtcctggatgcgccgatgaagcacgcacacctcatcgttccccgtaccctggtcgccggcagcgcgtccggcgaactgctgtacgcaccgaccggcctgagcttctggggcggcgtcgacccgcgcagcgcggaagtgatcgaccgtcaccacccgctcagcggccgccatctacacggcaggctgctggcgattcccggtgggcgcggctcctgtaccggcagcagcgtactgctggaactgatcctcggcggacgtgcgccggcggcgatcctcctgcgcgaaccggacgaaatcctcgccctcggcgcgatcgtcgccgaggaactgttcggccgctcgctacccatcgcctgtctcggcgagcgcttcgacgaactcgccgcctatccctgggcgcgcctggccgacggacgcctggaactccaccgcgatgccccgccgccgctggaggcccgacccgccgaagcgctggcgaccgatgccggcccgcgactggacgccttcgaccaggccctgctcgccggcgaacacggcgaagccgcacgcctggcgatgcgcatcgtcctgcgcatggcggcgttgcagggcgcgcaacggctgatcgacatccagcgcgcgcacatcgacgcttgcatctacaccggcccggccggcctgcgtttcgccgagaccctgcgcgacctcggtgcccgggtgcgggtaccgaccaccctcaacgccatctccgtggaccagcgccgctggcgcgaacagggcgtacccgccaccctcggcgagccggccgcggccctggcccgggcctatctcgacatgggcgcgcagcccagcttcacctgcgcgccctacctgctcgacgacagcgcgcgggccggcgaacagatcgtctgggccgagtccaacgcggtgctcttcgccaacagcgtgctcggcgcacgcaccaacaagtacgccgacttcatggatatctgctgcgccctcaccggtcgcgcgccgctggccggctgtcacctcgacgagcagcgccaggcgcgggtactgatcgaagtggaagacctcggcagcgtcgacgatgccttctacccgaccctcggctacctctgcggcctgctctgcgacggacagatcccggcgatcgacggcctgcggcagcggcagccggaccacgacgcgctcaaggccttcggcgcggcgctgggcaccagttcctcggtgccgatgttccacgtcatcggcgtcaccccggaagcccctgacctggccagcgccttcggcggccgcgcgccgcggcggaccctgcgggtcggacgcgagcgcctgcgcgacgcctggcgcgagctggacagcgccggcgagacgcggatcgacctggtggcgctgggcaacccgcacttctccgccagcgaattcacccagctcgccgcgctctgccacggccgccgcagacacccggaggtagcgctggtgatcaccagcagccggcaggtcgtcgcccaggccgaagcggccgggcacctggcgacgctgcaggcgttcggcgcgcggctggtcaccgacacctgctggtgcatgctcgacgaaccgctggtgccgccgggcgcgcgcaccctgatgaccaactccgccaagtatgcccactacgcccccggactggtcggccgccaggtgcgcttcgccggcctcgccggctgcgtcgaggccgccgtcggcgggcgggcccccgccgggctgcccgcctggttgagcgaggactgctgatgttcgactacaccttccactggcgctcggcgttcaacgccctgccggagatgctcgccggcagcctggtgacgctccaggtcaccgcgctgtcgatgctcttcggcatcctcatcgccctgctcctggccttcgcccggctcggcggccaccgcccgctgcgcgccgccgccggagcctggatctccatcgcgcggaataccccggcgctgttccagatctacatcctctacttcggcctgggctccttcggcctgcacgtcagttcctggttcgccctgctcgccggggtcaccttcaacaacgccggctacctcgccgagaccttccgcggcggcctccaggcggtgcccgaaacccagttgcgggcggcccgctcgctgggcatgagcgcgccgcaggcctatcgcctggtggtgatcccgcagctgctgcgggtggtgttctacccgctgaccaaccagttggtctgggccatgctgatgacctccctcggcgtggtggtgggcctgaccgacgacctcaccggcgtcacccaggcactcaacgtcaagaccttccgcaccttcgaatacttcgccctggccgccgtcctctacttcgccatggccaagctgctggtgctggccgcccgcctgctgggctggcgcctgttccgttactgaggggaatgccgtgttcaccaccagcctcaccgccaacgacctgctgttcctcctgcaaggcgcctggaccaccctcgccatcaccgccatggcgatgctgatcggcaccctgctgggtgtcgtcttcggcctgctccgcgccctgctgccacgcgccagcctgccgctggcggcgctgctcgacgtattccgcagcgtgccgctgctgatccagttcgtcctgctcaattccttcaagagcatcctcggcctcgactggagcgccttcgccgtggcctgcctggtgctcggcgtgtacgccgccgcctactgcaccgaggtggtccgcggcggcgtcctctcggtaccgccgagcgtgcgccgggcggcgcgttccctgggcctgagctatcgccaggacctgttccacatcgtcctgccgatggccgcccgggtggccttccccggttgggtcaacctgaccctgtcggtgatgaaggacacctcgctggtgctctggatcggcatcgtcgaactgctgcgcgcctcgcagaccatcgtcacgcgcatccaggaaccgctcttcgtgctctgcatcgcggggctcgtctattacctcatgagctgggtggtcgcgcgactcggcgcccggctggaacggagatggcagcaatgatcgagatcagcgacgtgcacaaggcctacggccagttcgaggtggtcaagggtgtcgacctgagggtggacaagggcgaggtgctgtcgatcatcggcggctccggttccggcaagtcgaccctgctgatgtgcatcaacggcctggagccgatccagcgcggcagcatccgcgtcgacggcatcgacgtgcatgcccgcggtaccgacctcaaccgcctgcggcggaagatcggcatcgtcttccagcagtggaacgccttcccccacctgaccgtgctggaaaacgtcatgctcgcgccgcgcaaggtgctcggcaagagccgcgccgaagccgaggcgatggcgctgaagcaactcacccacgtcggtctcggcgacaagctcaaggtcttcccccagcgcctttccggcggccagcaacagcgcatggcgatcgcccgggcgctggcgatgtcgccggactacatgctgttcgacgaagccacctcggcgctcgacccgcagttggtcggcgaggtgctggacaccatgcgcctgctcgccgaggaaggcatgaccatggtcctggtcacccacgagatccgcttcgcccgcgacgtgtccgaccgggtggcgttcttccgcaatggcctggtccacgagatcggcacccccgaccaggtgatcggcaacccgcagcggccggagacggtggaattcctccgctcggtgctctgagcccgcccccgcacaggagatagccatgcgttcgcagcggatcgtccacatcgtcagttgccatgccgaaggcgaggtcggcgacgtgatcgtcggcggcgtcgccgcgccgcccggcgccaccctctgggaacagtcgcgctggatcgccagagaccaggacctgcgcaacttcgtcctcaacgaaccgcgcggcggagtgttccgccacgccaatctgctggtgccggccaaggacccgcgcgcgcagatgggctggatcataatggagccggccgacaccccgccgatgtccggttccaattcgctgtgcgtggccaccgtactgctcgacagcggcatcctgccgatgcgcgaaccgctgacccggctgctgctggaagcgccgggcgggctgatcgaggcccgcgcggaatgccgcgacggcaaggccgagcgggtggaaatccgcaacgtgccgtcgttcgccgaccgcctcgacgcctggatcgaagtcgagggcctcggctcgctacaggtcgacaccgcctacggcggcgacagcttcgtcatcgccgacgcccggcgcctgggcttcgccctgcgcgccgacgaggccgccgagctggtcgccaccggcttgaagatcacccacgcggccaacgaacaactgggcttccgccacccgaccaacccggactgggaccatctgtccttctgccagctggccgcgccgccggagcgccgcgacggtgtcctcggcgcgaacaacgcggtggtcatccgccccggcaagatcgaccgctcgccctgcggcaccggctgctcggcgcggatggcggtgctccaggcgaaaggccagctgcgggtcggcgaacgcttcgtcgggcgctccatcatcggttcggaattccactgccacatcgagtcgctgaccgaactcggcggccgttcggcgatcctcccatgcctgtccgggcgggcctggatcaccggcatccaccagtacctgctcgacccggacgatccctggccgcaaggctatcggctgtccgacacctggcccggcggccactgctgaccaccccgcccgaccgcaggcagcggccgggcggaaaccgatccggcgcgtaccggatcgcccacgacggcgaacgctgccgtcgccctgtgactcggaccgcagcggtccgattgaattcgtatacgaaatacgaaaaaaggagaaaccatgagcaagcacgtcaactggagcggcgtattccccgcggtcaccacccaattcaacgccgatttctcggtgaacctggaggaaacccacacggtcatctccaacctggtgcgcgacggcgtgtccgggctggtggtatgcggcagcgtcggcgagaacacctcgctgaccatcgaggagaagatggccgtcaccgaggtcgccaaggatgcctccggcggccgcgtgccggtgatctgcgggatcgccgagttcaccagcgccggcgcggcgaaggtggccaaggcggtggagcgggtcggcgtcgacggcatcatggtgatgccggcgctggtctattcctccaagccgcacgagaccgccgagcatttccgcagcgtggccagcggcaccgacctgccggtgatggtctacaacaacccgccgatctaccggaacgacgtcaccccggacatcctggtttccctggccgactgcgagaacatcgtctgcttcaaggacagctccggcgacacccgccgcttcatcgacgtacgcaaccaggtgggcgagcgcttcatcctcttcgccgggctcgacgacgtggtcctggaaagcgtggcggtgggtgcccagggctggatctcgggaatgtccaacgtgttcccgaaggaaggcgagaccatcttccgcctggccagggccgggcgcttcgccgaggcgatgccgatctacgagtggctgatgccgatcctccatctcgacgcccgtcccgacctggtgcagtgcatcaagctctgcgagcaactcgccggtcgcggcagcgccctcacccgtccaccgcgcctggccctgcgcggcgccgatcgcgagcacgtcgagcggatcatggccaaggccctggccaaccggccggcgctgccggacgtcggcttgtagccgacgccccgccctcgccgcctcgctccccggggagcggccggcgagggccagcggcagagcattccgtccaccgtccccagggaggccccatgcccagcatcctcggtcacaactacgtcggcggcgctcgcagcgccgccggcaacctcatcctgcgcagcctcgacgccgacagcggcgaagcgctgccctacgccttcgtccaggccaccgaggcggaggtcgacgccgccgcccgcgccgccgaacgcgcctatccacactaccggcaactgtccgcaacgcgccgcgccggattcctcgaggcgatcgcctcgcgcctcgacgccctgggcgacgacttcgtcgccctggtccgtcgcgagaccgcgctgcccgccgcacgcatccagggcgaacgaacacgtaccgccaaccagttgcggctgttcgccgaagtcctgcggcgtggcgacttccacggcgcgcgcatcgaccgtggacaacccgggcgtaccccgccgcgccccgacctgcgccagtggcgaatcggtctcggcccggtggcagtgttcggtgccagcaacttcccgctggccttttccaccgccggcggcgacagcgccgccgccctggccgccggctgcccggtggtggtcaaggcccacggcggacacatggccacagccgaatgcgtggccgacgcgatcctccaggcggcggccgacagcggcatgccggccggggtattcaacatggtctacggcagcggcgtcggcgaggcgctggtgcgccatccggccatccgcgcggtcggcttcaccggttcgctcaagggcgggcgcgcactgtgcgacctggcagcggcgcggccgcagccaatcccggtgttcgccgagatgagcagcatcaatccgctggtggtgctccccgaagccctgcgccggcgcggccggcaggtggcggaggagctggccgcctcggtgacgctcggctgcggccagttctgcaccaagccgggcctggtgcttggcctgcgctcccccggcttcgacgccttcgtcgcggccctgggcgaggcactggccgccaggccggcacagagcatgctcaacgccggtaccttgcgcagctatgtcgaaggactgcaacgcctggagcgccatcccggcatccggcgcctggccggcgcgccacaggaaggacggcaggcccatccgcagttgttcaaggccgacgtgggcctgttgctggaaggcgacgaactgctccaggaagaggtgttcggcccggccaccgtggtcgtcgaggcggccgacgaggaacaggttgcccgcgcgctggacaacctgcacggccagttgtcggctaccgtgatcggcgaagcggacgacctcgcggcgttcgccgggctggtcccgctgctcgaacgcaaggccgggcgcctgctattcaacggctatccgaccggcgtcgaggtgtgcgacgccatggtccacggcggcccctacccggccacctccgacgctcgcggcacctcggtgggaaccctggccatcgaacgcttcctgcgcccgctgtgctaccaggactaccccgacagcctgctcccggacgccctgaagaacgccaacccgctgggcctgctgcgcctggtcgatggccggagcacgcgcgaggccctggattgagcacgcctggaagcctggatggcggatagcgccgttggcgctatccgccctacgcagtcgtcctcgttgcgccacgctgtccggtcggcccctcgccttgcgctcactccagcaacgccagcagctcccggtgcaacgcctcgggaatcgtcacgccgtccctggcgctgcgttcgcgcgcttcgaagcgtcgctgcgagggcaagcgcgcgccctgttcgacgatgccttcgaacagcgtctcggcgcgcgccaggtgctcctccgccgaggcgccgagcatgcgccgcggatcgatggcgatcagcagttcgccaccgtagggagaagaacggctgccctcgtcgtaggccagcgactcggcactggtcaggtcgccgatcagcggaccggcgagcagttcgaccatcgccgccagggccgagcccttgtgcccgccgaaagtgagcatggcgcctcgcaacgcggcgctggcatcggtggtcggctcgccctgctcgtccaccccccagcccagcgggatcggcttgccggcgcgttcgtgcaactggatctcgccacgcgccacggcgctggtggcgaagtcgaagacgaacggcgggccgtccggacgcggccagccaaaggcgatcgggttggtgccgaagatcggcttgcgtccgcccgccggcgccacccaggcatgactcggcgtggtcgccagggccaccaggcccgcctcggtgagtgcctcgacctcaacccatagcgcggagaaatgcacacagcggttcaccgccatcgccgcgataccctggctgcgggccttctccagcagatgcggcagccccagccggaatgcgcactgggagaacccgccatgggcgtcgacccgcagcaggccgggagcgatgtcgtgcagttccggctcggcgtcggcggataccttgccggccttcagggtggcgatgcagccgagcaaccgccagataccgtgggacgcgcattcgtcgcgctcccccgccaccagggtatcggccaccgcctgtacatgggcttcgctgaaagcgtgccggcgcaggatgcgcacggccagctcgcggacctcgtccagcgtcattcggatcacgggcttctccttgttcgaccagtccctagggtggcctgccgcgacagccttctcttgacctcaatcgacccggagcatgccgaaaacggcacaaccggctcgagcacatcgaaaacttacagaaaattcctagcaatcatgtaaggcaattccaaatagccccgcagaccatcaagaaacccttccgcgccccgctacaggaccaagcaccttcccacagcccggtcggagaccaccccatgcttcttcgtcgtatcgccatcaccccacgcgccgtcatcggcttcgccatcctcgcctcgctgctggtggcgctcggcctcttcgcgcacaaccgcatgggttcgctgaaccgcgccgccaaggatatcggcgaggtctggctgcccagcgtcgaagcctcggcccagctcagcggcctgatgagcgaactgcgcctcggcgagatgaaccacgtgctgctgcacgacgccacgcgcatgcgccagcaggaacaacggatggacgaggtcatcgctaccctcgccagggtggaaagggaataccgccccttgctggtcctggacgaggagcgcgcgttgctcgaccagttcgtccagcgccagcaggaatacctcgaaggacacgccgccctgctcgcgctgtcccgtgacaaccgtaccgacgaagccagcgtgctgatgggcggggcccagttgcagcgctacgagcaggtgcagcggaccctgaagcaactcatcgccctcgaccgcgaggccgcccgcgcctccaccgccgaagccgccgatgtctactcccgggcctccaccgcgatcctcgcggtgctgctggtggccctggcggccagcgtgacgatcgcctggctgctgacccgcagcatcgtcgtgccgatccgccaggcggtgtcctgcgccgaccgcatcgcggcccgcgacctgaccggcgagatcgccagcgacggcgacgacgagccggcgcaactgatgaaggccatgcgcagcatgcaggccagcctgcacgacaccatcgagcagatcggcgattccgccgcgctgctggccgccgctgccgagcaactgaacgcggtgaccgaggaaggcaaccggtcgctggcccggcagaacgatgagatcgagatggccgccaccgcggtcaacgaaatgagcgcggcggtcgaggaggtcgcgcgcaacgccagctccaccgccgaggcctccagtctctcggaacgggccgccggcaacggccgcgcacgggtcggacagaccgtccgctcgatccgccagatgaacgccgagatcggccagaccgcgcgcctggtggaaggcctggccagccaggcgcaggatatcggcaaggtgctcgacgtgatccgcgccatcgccgagcagaccaacctcctcgccctcaatgccgccatcgaggccgcccgcgccggcgagcagggccgcggattcgcggtggtcgccgacgaggtgcgcgccctcgcccaccgcacccagcaatcgacccatgagatcgaaggcatgatcgccagcgtccgcgagggcaccgacaccgcggtgtccgcgatgcgcgagaacgaccagcgcgcccggcagatgctcgacgaggccgaggccgccgaccacgccctgggcgagatcgccgagcacgccacgcggatcaacgagcgcaccctggtgatcgccagcgctgcggaggagcaggcccacgtcgcccgcgaggtcgatcgcaacctggtgaacatccgcgacgttgccgtgcagaccacccagggcgccgagcagacccgcggcgccagccacgagctgtcgcgcctggccaacgacctcaagggcatgatcggtcgcttcgtggtctgacccgcaagcgagctagggcgtcgcgcggcgcagcaccaactgcccgccgtcgcccttctgcacccggtagtcgccctcgccctggcgaccgaggagcatcagggtcaggccgccgcgttcgagcagcgcgatcccggccggggtaggcctccaggcgcgcggctcgctgggcagccagcgcgtgaggcaggcggtatcgccgcccaggtcgtagccactggcttccgccacttcgctgtcgcgcagctccaggtggcagatcgcgggcgcctcgtcctgctgcagggtccattgcccggcgagatcggaagcgctgagaagaatcagactgctggccatactgatacctgtgctgaaaaaaccgcagagcaagcaaaccatcctggagagcttcgcgcttgccgacatcgagagatctccttcaagcctggaacatcggataacacggcgaacgccgcccgccatcctcgcttcgaacgccagcgcgcgccaggcgccgcgggcctccgttcgtccgccaggccgccggcccacgggcgcgccacagttcacaacttcgctcctgtggaagacacctatcaattcgaacagtgcccggccggccgaagggccgcggttcgtaccgccgcaccgaaccgcgcccgcttcagcgcgtcagacgacgatgtcggcctgggtcgcctggccgatcagattgatcgcgaaatcggcatgggcgtccccgctgaagtcgatcgccaggctgccggccttgctcgccgcgtcgtaggacaggatcgcctggccggccttgccggcgaaggcgtcgacgtattgcagcaccagcccgccgttgacgaaggcatccagcccggacaggtcgatcttgtcctggccgctgacgaagtcgcgcagggtatccggcgccgccgcggaggactcggcgatatcgccgtagacgaaggtgtcggctcccgcgccgccccacagctggtccgcgccgaggccgccgtagaggatgtcgttgccggcgccgcccttgagcacgttggccacgtcgttgccgatcaacaggtcgctacccgagccgccgatggcgttttccacggtaaccccggcagcgatcgacacattgcccttcaacccgccgacatcggacagcgccttctcgttgaggttgatcttctggttctggctgaagccggagaagtccagggtgtcgttgccgccggcgtcccacaccgagaacaccagcttggaactggacgaggtggcgctgtagaagtcgcgctcggtgttggagttgaagccgtacaccgtgtcgccggtgcgagtggtcaggttggccccgtagagcttctggatcgccgcgatgtcgtccagcagcggtgccgaggaataggcgcccttgaagtcctggccggtgttctgctcttcccagtagctcatcaccgaataggcgcgggtgtcctcggcgtaggtagcgtcggcgtaggtgggatcgccctcgccggcgttgtagtcgccggggtggctcaggcccagggtatggccgatctcgtgggtcagggtctggcgtccgtagttgccgttggccggattgacgttggcgctgtagctgctgttgatcaggtaccaggattgccccttgagcgcatccggtacatccggcaggaaggcgaacgccgcaccgccgacactactgctgaagttgccgaaggtcaggtcgccctgatcgccctggccggcgtcgacgaagtggatattcgtgacgtccgaccaggattgcagcgacaacttggcctgggcctgctgctgcgcggaaaaggcgctgaacttgcccagcgagtagatatcgctgacatacttccacggcgtattgaagaagtcgttcggtttggtcaggaacgaataggacagggtcagcaccgagtcgcccggcgctttctgccaagacgcctgttcgcggaggatctgctccgccgcctggtcgacggtataggacggatggccattgaccaattcgtccccgccccgcgcataggcatgcaggaagttgtctacctgggtatacgcatcgctacgacctttcaatgcaagagaattgctggacattgtcatatccctttaagttgtaaaggaaataactcggatacaattatcggatggataattgcagttatcggccagatcaggccgaagtccaaactgacacagctcattttccaatgtccacaggtttcacgaaaaaaattaagctgcacttaaagcatatgcacgaacgaattccgcatatatgaaatcatgcaggaaagataaactaccgaagacactggaatattataaaaaccgtttcatataaatagcgccttattgaaaaaacaattccatgcgtattgttcgacctctgtcgacccgcccgggacatcgacttcacgccaggcgaacaattgcctgcacgtccttcgcggtctcaattgagcgcgccccggttttcctccgtatcggtcttcgacagggtgtgcagcggcgccgggcaatccgtcgtcgcgcagtcgcggcggcgcgccggcgtctcgccggaaacgaagttcgccgccaccagttccaggtcggcttcgtccagcaccccggcgtagaaacgcaggcgtgcccaggccgtgaggtagtcgtacttggccttggacagctcgttcatcgcgctgtacagcgcctgctcggcgttcagcaggtcgaggttgacccgcaccccggcggcgatgctcttgcgcgtggccatcaccagcgtccgcgccgaatccacggtcatctcgtaggcgcggatcttcgccgcgctgctgctgctctggttgtacatcttgcgcacctggttgagggtctcgcggaccttgtcgtccaggtcgtaatggctcttctccatgcgatgcgtggcctggcgcgtcgccgccagggtctcgccgccggagaacagcggaacgctcaactggatgccgacgctgtcggtctcgtagcgctggttgtaggtattctccgaaccggacttggacttgccggtgctggcgtacaggcccaggcgcggcaggaagtcggcgcggttctgctcgacctcgtagcgggccacgtccaccgcgtggcgcagcgaggccagctcgggattctcggccagcgccaggtcgcgccaggcggtgtagctggcggggctcagcgcgcgcacctggaagcgttcgccgagcggcgccaggtcggcgatctccagcggcgccccgaccagccgctccagctcgcgcagggcggcatcctggctgtcccgcgcctcgatttcctgggcctgggccaggttgaagcgggcctgggtctccagggtgtcggtgcgggtgccgttgccgcgctcgaactggcgctggttgagctggaactgctcgcggtaggagcgtttctgcgcccgcgccagttcgatctggtcctgggccagcagcgcgccggtataggcttccaggacccggaccagcagttcctggctctggctgcggaagcgctcgtcggacagcagcgcctgggccacgcccttgcggtagcggctgaaggcctcgtagtcgaacaacggctgttgcaggctgagggtggagacgtagctgtcgtagtcgcggtcttccttgaaatcgccgcgggtggtggtctgggtcacatcggaccagctgcgcccacggttgtagctgtacaccaggcgcggcagcagcgccgcgcggccgagcgcacggtattgcctgccggcctcgtgctcctggatcgcggcctggaactgcgggtcgttctccagggccaggtgatagccgtccagcaggccgagggcgaaggcgtcctcgcgcagcagcaacaggaaggcgccgaacagccaggtcatcaggcggcgcatggtcatcggtcagttctccgccagcgccacgtgggcgcggtcgaacaggggcttgaacaggtaattgagcagcgagcgctcgccggtgcggacgaacacctgcaccgccatccccgggcggatctgcaggcccttcagcttgcccatcgcggccgcgtcgacctgggcgcgcagcgcgtagtagggctgcttgttctgctcgtcgagcaggcggtcggcgctgaccatggtcacctcgccggtgacccgcggggtcttgctctggttgaaggcggtgaacagcatctccaccggcagcccgctgtggatccggtcgaccaggttcaccgcaagctggccctccacttccaggctgtcgctgttgggcacgatgtacatcagcaattcgccggggccgatcaccccgccatcggtgaacaccttcaagccggccacgtagccgctgaccggcgcgcggatctcggcgtggcgcagttcgtagcgcgccgaggacagctcctcccagagcgtccgcgcattgacctgggtttccgccagttgcccgttgacttccttgcggtactcctcctcgcgttgggcgatgcgcatctgcgcctcggcgatgctctggcggatctgcccgaagcgaccgctgctctccgatagccgggcgttcacctcggccagttggcgctcctgttcgagcaactggttgcgcggcatgtagccttcctcggcgaggtcgcgcgcaccgctcaactggctgttcaacaggcgttgttgcaggcgctggttgccctcggtctggcgcaacccttcgagctgggcgcgcagcccctcgatgttcgcccgcaatgcggagagttcgttggccagcgcggtctggcggctgtgcagcaactgccgctgcaactccaggcgctcgccgagggtcggcagcggggcctgctcggccagccccgcgggcatctccagggtccgccggccgtcgtattcggcctgcaggcgcgcctggttgagccgcgcgttggcgtaccggttgagcagcgaatcgacgttggcccgggcctgggtcggttccatgcggatcagcggctcgcccgcctccacatgctggccgtcgcgcactaggatgtgcttgaccaccccgcccagcggatgctgcaccgacttgcgctggccggagatgatcaccgtggccggcaccgccacgccctggtcgagcggcgcgaaggcggcccagagcagcgcgccgccgaagccgaacaggaccagcagccagcccagtcgcgcataggcgttctcgtcgcgtttcaccgtgcgggtcattccacacctccctggcgcggcgcggccaccacctgcggcgcgccgtagccggccacccggtagtccgcgcgctgctgcgacgccgacgcggcgcgctggttgttcaaggcggcgagcacctggtcgcgctcgccgtacaggtgcaactggccggcgttcagcgccagcaggcggtcggcgcaacccagcacgccggcccggtgggtgatcagcagcaccgtgcagccacgcgccttgagcgcctggatcgccgccagcagcgcctgctcgccgctgtcgtcgaggttcgagttgggttcgtcgagcaccaccagggtcggcgcgccgtacagcgcccgggccagggcgatgcgctggcgctggccgccggaaagcccggcgccgccgacgccgagcacggtgtcgtagccctgcggcaggcgcaggaccagttcatggaccccggccaggcgcgccgcctccaccaccttgtcggcctgcacctcgccgaagcgggcgatgttttccgccaccgtgccggcgaacagttcgatgtcctgcggcaggtagccgatgcgcgggccgagggtctcgcgctcgtactggcggatctcggcgccgtccaggcgcacgctgccgtgcagggtcggccagatgcccagcactacccgcgccaggctcgacttgccggagccggacggaccgatcacgccgaccaccgagccggccgggatcgccagggtcaggccacgcagggtgcgcgcctcgctgccgggcggcgccgcgtccagcgattccagcagcaggtggccacgcggctcgggcaattccatgcgccgctcgcgggcggggaattcgtcgagcaggccgctcagccggcgataggcatcgcgcgccgcgccccactgcttccacacgccgatcagttggtcgataggccccagcgcacggcccatcaggatcgagccggcgatcatcatccccggggtgatgcgtccctccaccgccagccaggcgccgaggccgagcaccagggattgcagggcgatgcgcaggtatttgctcagcgcgttgatccgcgccgcgcgctcgctggccaggctctgctggtcgaggaacgcctggtgcagccgttcccagcgcccgcgcatgctgccgagcatgcccatcgcctcgatcacctcggcgttgcgcaggttgttgctggccagttggccggacttgatcgacaactcgccggccttggccagcggcgcacgggtggcgcgttcgttgaaccaggccagggccatcagggccagcgcgccgaccagcgagagcaggccgagccaggggtcgaagaggaagatcaccagcaggtagaccgggaaccagggtgcgtcgaagaaggcgaacagcgcctggccggtgatgaactggcgcagggtggtcaggtcgtgcagcgcctggctggcctcctggccgccggcgcgcaggttgcgttcgaaggcggcggcgtagatccgcccgtgcaactggccgtcgaagcgttcgctgacccgcaccaggacgaagctgcgcagcgcctccagcgcgcccatgaagacgaacacgccaagcgccatcagggtcagcatcaacagggtgacttcgttggccgaggacagcacgcggtcgtacacctgcagcatgtacagcgagggcaccagcatcagcaggttgatcaccccggagaacgccgccacgctgcgcaatgcgccgcggctggccgccagggcctgtttgatttcgttggtaacgctggaaccgagccttgccatcgagcgcgctcacttctgccacgactgccgctggaatcccgaatgagcccggatggcacctccctgtgccgggcgttccctcgccgtcaggcggccagggcctgatgctccggcgccgggtcggcgccgatcagctggattgtcggcggcgccgcttcgccgccgtggccgagcagcgccgcgagcaccttgccggccccgtccagtgcgctgtgcgcggtatccccggcgataccggcgacgatcgacaggtcattgtcgaggtcatgcaccagctcgatctggcccttcggcccgaccccggcgacatcgacaccggcaatcgtttgcgcatacagcttgctgtcgaagtgcaggtccagcgtcggcagcgagacaccgatgtccttgaccaccggcacgtagccgaggatgccgccgacgatgggcaggtccttgagggtcacctcgttccagctcagcagcttgacctcgttgtagctacccagctccagggtgccgccgagattggccacgccgaggttgtagctgggtccggcgataccgtagaacttggcgctgaagccttccttgtcgaccgagccgaccactcccaggccgccgaggttgagcggcgccagcaccggcaccagcggcgcggtgatcggattcagcgccagggctgcggtgaccagcggagtcagcggcgtctcgccgccgaaggtcaggccttgctcggtgagggagacgttgatcggcagcgggccgaggatgccgcggctatcgggaatcacgccctggtcgtgattgccgccgagcagcgagccgatcacattgaccccgagcaggccgtcgctattgccgaggcttagcgagccaccctggtaggcggcgtggtagagatcgttggcggccttcaggctgtcgctgccgaattcccaggcatggccgacggtggcaccgacgccctgccccaggtcaccgaccagcttcaggtaatcctccggctcgacgcgcccgtgcaacaagtcgtcggcgatcgccagcgagttgccggccagcccgcccagcgtgccgaccgcggagcctacggtgtcgagggcgtcgccggcgatctcgccgagcgtgccggccaccgcgccgaccgtaccctccagcgcctgctccacgctggcaacggcgtcatgcaccgatgtcagcgcttcgtgcacctgctgctccacggcgtcgacggtggagcccaccaatgtcctggccacgtccgccaccgccgtgacggcggtggcggccacctgcgtcgcgcgctcgtagacctggccgaacaggttcgcggctgcattgaataatcccatcttctgttcctcgattgagttgtctcggttatcgcgtttccggcgcaggtcgctgtttaccgaccgaaccggtcacgcggttaagcgcagtcagtgagttccgcgagaaaacggaacgcgggtacctgaaagttcatcaggcctggcgacaacttgtttttattggaagacaggagccccccgagggcgaaacccatttaatcccgagcagcccgcaacagagcgctctccaccgcttcgcctgttaagtaggactaacatgggaaaggcaaatttgtaccaccacttaaatcagttcaatactttggttgggcataccgacctgtcagttctgccaggtggatttccaagcccctgattcctaaacggattattgacgcttttaattaatatcgaatgacggacggtcgccccggtacgaactctgacgaaaatcagaaatgaagaaagggttatatccttatgcaccaaagtgccgagccgccctcgcggcgtgcccaactagcgtgcaacttcggcagcgccctcttcgaagaagcgaatgacacttttgcgtggctcataaggaatactcttattacgtgaagcgcatcacaaaatattgaatcgaacagtccaggcggattgttttctcctggtaaacgatgattaacggcgcgctccaaggccgggttatttcaatgaatcgcttcagccaacgccttgcctgccgatagcctctgccgtcacccgttcccgcccttgctccccgccttgcctgcccctatcctgcgcccgtcacggccaaatccgtgaccgggtttgacagcccgaagagacggcgcgatgcgccgagcggtgcatgcgaaagcagcgaatgcttttgcaggcatcggctcgaccgcagttttccaactgcgggccttcatggcggatcgcgtggggagaccctcgtggtctgccggttccgtttcccggtctgtcaaccctgcgcgatcctgcctccatcgattgacagcgaaggcggcaggtcatgtgactctcagaaacggagtacccagcatgacgaaggatgaaaaggaaaagacccacgtcgacgcaatcatcgaacgctacaaggacctgatggtcgagattccccccgccgaccggcaacccggtctctccctgctctggccggttcccgcccagcccgccatcgacaagggcgtccgccaggccgagaactggcttgccgaccagatcgaaggccagctctggaccgccttcgccttcggccgcgacagcctgcccacaccgatgcagaagaccgccttcgaagtggccttcctgacgcgcctgcagcagcgcctggtagccgatcgacgttccggttgacccgaccatggcgaatgacgccggtggcgtcgttcgccccgacgtcaggtctccatcgcggtctcgggcaccgcgtacgaaatcgtcgccaggctccgcctcgcggtaacggtcgagcgcccccgtgcgccatcccgcccagccggattgaacgcaagcgcacccaccgccctcctatattccatacgacccaccacctcaaccggaaccgagcaagactccgcagacatggcacagcctttcaccatcgagccggacccgaacaccctcgaccatccaccggccttcctggccaacggaggagcggtcgggaaactgttgctcagcctcgacgcggccagttcgcccctcggcccgccggacgcctggtcggcgagcctgaagacaacgatggccacgctgctgccggccaaggcgcagatcgtgctgttctggggcgcggaattcgtcgccctgtacaacgatgcctacgcgccgagcatcggcgacaagcatccgcgcgccctcggtcggccggcgatagagaactggcgggagctgtgggatgacctcgaaccgctgctgcgcggggtgtacgagaccggtgaaaccttcgcggcaaaggatcggcccttctacatcgaacgccatggacgcggcgagacggtctatttcgacgtgtcctattcggcggtgcgggaaaccgacggttccgtcggcggcgtgctgtgcatcgtcaccgagaccaccgagcgggtgcgttttgaacgccgccaggcgttcctcctggaactgggccagaccctgccgtccctggccgatcccctggaaatcgaagccaccgccctgcgccggctcggcgaggagctgggcgcgtcgcggatattcttcggcgaggacaacggcgacggcatgaccttccaggtccatcgcgactatctccacgacggccgttcggcggtcggtcggcatcgctacctggcgttcggcgccaccctgtccggcgaactgcatgccggacgcagcgtggcgcgggaagacctcgccggggagcgcggcatgagtctcgacgaggcggcgagccgcgcgcgcctggggctgggcgccacgctgcacgtccctgtgctgcgccacggccggctggaggcgctgctggcgatccacttcgcccatccgcaggccctcggcgaagattcgcgccgcctggcggaggaagccgccaagctggcctggacctcgctcacccatgcccgcgcggagctggcgctgcgcaccagttccgcgcaactggcggcgatgttcgaccaggccagcgcgggcatcgcggtatgcgaccggaactggcgcttcacccgggtcaacgatcgctactgcgagatcgccggccgttcgcgcgagaccctgctcggcctgcgcatgcaggacatcctcgaccccgccgacttcgccctccctgcggcgccaggcggagcgaccggcgcggcgttcgagatgagcggccgctacgttcgccccgacggcgatacggtgtgggtgcagaaccaggtcacgccgctggtggacgagcagcatgccgccagcggcctgctctgcgtgtgcatggacatcagcgcgcgggtacgcgccgagaacgagctgcgcgaactcaacgaaagcctggaagaacgtgtcgcgaccatgctcgcccagcgcgaaagcgccctggcgcagcttcacgaggcacgcaagatggagatggtcggccagttgaccggcggcatcgcccatgacttcaacaacctgctgacgccgatcatggcctcgctggaactgatccgccggcggctcgacgacgcccgctccaccgacctcatcgacggcgcgctacagtccgccgaacgggcgcggaacctcgtcggtcgcctgctcaccttcgcccgccggcaaaccctcaagccgcaggcggtggccctgcgcgagctggtcgaaggcatgcacgacctgatcgagcgctcgctcggcccgaccatcgaggtccgcatcgagatcccggaacgcctgcctgcggtggtggtggatccgcaccagttcgaactggccatcctcaacctcgcggtgaacgcccgcgacgccatgggcgaaggcggccgcctggaaataggcgcgcggaccgacctggtgatcgacggcgcggtggacggtctcggcgccggccgctacgtgtgcctggaagtcgccgacaacggcggaggcatgcccgccgaggtgctggcccgctgcatggagccgttcttttccaccaagggcgtgggcaagggcaccggcctcggcctgtcgatggtccagggcctggtcgcccagtccggcggcggcctggggatccactcggagatcggcaaggggacccgggtgagcatctggctgccgatcaccgcggagcagacgcaatccaccgcagaaagctgcccggacgcaccggaagcgttgcggccgacccacgtgctgctggtcgacgacgacaggatggtgcgctacaccaccgcgctgctgctcggcgatctcggctaccaggtcagcgaggcggcgtcggcggaggaagccctgggcgaggtcgagcgcggcctggcgcccgacctgctggtcaccgaccatctcatggccgacaagaccggcgtgcagcttgccgaggaactgcgccagcgcttcccgcaattgccggtgctggtcatcaccggctacgccaacctcaggcccgagcaactcaacggcttcgaggtgttgaccaagccgttccgccacaacgaactcgccgaacgcctcgcccggctgctggaagcctcgccgtgaggcgccgggccggcggaacgcctcagcgcacccgctcgcggctcttcaccgccaggtccagggctttctgcatgtccagccgcgccgagcggccgacgtcgcggtggtccaggcggtagccgcgctccgagggcaggatcggtgcggtgaggtcctcggcatcggccggctcgaaatcgtagtcgccgccgatggtcatggcgctgcgccggagcagcatgcggatctcctcgggtcgcagccgcgggttgagggaaagcatggcggcgaccgtgccggcgaccatcggcgtggcataggaggtgccgcagtgcacctcgccccacgcgtcccgctccagggtcgaggcatgggtacaggcggcggcggtgacatccacccgcatgtcgacattcgaggtgctgcgcttgaccgcgtaggccggatcgtccaccgccaggccttggcgctcgctgcgctggtggccgcccaccaccagcaactgctcggtgacgaaggaggacggcaggcggtattcgtcggtaccggagtaggacgagccgttgccggcggagttgaccaccagcacgtccggatgctccttgcgcagccagaggaagaattcctcgagcaactcctcgtagccgctcatggcgatccccgagcgcaccagcgaatccacctcgtcgccgtcgacgtcgcgagcgccgacgcggtggatgccccagctccagttgagcacccgcacgccatcctccaccaggttcaccgaggcggcgacgttggccgtgatgccagcgtccgaattgcgctcgacgatcacttcgaaaccctggctggcgcggtccagcccacgcaggaagccactgttgccgccctggtcccagcgcgcggcgaggatgccggcgaccgtcgaaccgtggttgtcgggacgttcggcatcgcgcgcgtagaggcaggtacgcggcgcgggcgccttgcaggggccgaggtagtcggcgaagtcgggggcgtcgaagtcgacgtcgcgctcgatcaccccgatgcgcaccgggcgggtctccagcggggcctggcgggcgcggacccgacgctggtaatagttcaccgcgtccatgaaacgattggccgcccactcgtcggagtcgctgtccggcttgtccacgggccggcgcgccgcctcggtttcctcgcccttctccggcgcggactcctccaccaccacggcgtccacgctggtctcgctgccgatgcggaggaccagcgcgtcgcgctggacgaggtcgcgcgccggcaggcgcaactggtagaggttcaacggcgggatcgcgccgaccacccgcgcgccatatttatcggccaggcgttcggcctcccggcgaccgtcgtggttctcctcgatcaacaggctgaccaggtcgacgtaggtggtcaggccatccatgttcttcgccacctcgtcgggaccggcggcgagcacatgactgccgttcagggtcagccataccggattgctgctgcgcccgccctgctccagccaaagcggaccgctggcgtggccacggcggtccaggcggagccgcaggccgtcgccctcgcgccgcagggcggtggccggcagttcgcggccgtccagcaacaggcgcggcaggccggcacccaggccgcgcacgcgcaggcaccactcctgccgctcgctggccaggagatcgccgcagcgctccaggcgctccaggcgcaggggtgtttcggcggcgaccaaaggactgcccagggacgcgaaaaggatggcgaaaacggcacggcgcagcggcatggactcagcttccggaacggggacctgttgttccgaccgcctggcgaaacgcttcgttcaggttgaaggcgggcgcaggctagcccgccagttgctccagcgctcgccgggtgacgccatcgatatagcccggctcgccatagatgcgcgccagcaggatggcgccttcgaaatcggccaccagttgccggccgcgctccagcgcctgcgcctcgtcgaaggccgggcggtagagctgggcgaaggcttgcgcccagtcgtcgaggaaactgcggatcggcgccatcagctcgctgcgaccatagctggcgtcgaccgcgaccacgcccatcaggcagccaatgctgtcgtcctggaacaaccgggcggccttgcggccgagtttttccaggcgctcgcggggcgtcagcagcgggtcgtaggcgatgctgaagagcgtctcggcgagccgctggtgggtccattcgagaacgtcgcggagcaaggcttccttgttcgggtagtggtggtagaacgaggccttggtcaagccgcaggcgctggacagcatttccatggtggtgccgtggtagccgtagcgacggaaggtgccggcgcagcgctggagaagctcgtcgcgggagattttcaacggacgcacggaaggttcctgctctcgatcaaagacgttgattctatgccataagccttggcgcctcaatttgacggttaccgaatgtttgtttagtttttacaaaccgaatgttcggtaggtaactagaagaagtttccgctccaccaacccaagcacaggagagaggcatcatgagcgaagccaacagcggcccgggccgcgtcacccgagagcagcgcggtcatctgtttctcatcggcctggaccgcgcgggcaagcgcaacgccttcgacagcgcaatgctggcggacctggcgctggccatgggtgaatacgagcgcagcgaggaatcccgctgtgccgtgctcttcgcccatggcgagcacttcaccgccgggctcgacctgatggaactggcaccgaagctcgccgccagcggtttccgctatccggacggcggcgtcgatccctggggcgtggtccagccgcgtcggagcaagccgctggtggtcgcggtgcaaggcacctgctggaccgccgggatagagctaatgctcaatgccgacatcgcggtggccgcgcgcggcacgcgcttcgcccatctggaggtgctacgcggcatcccgccgctgggcggatccaccgtgcgcttcccgcgcgcggcgggctggaccgacgccatgcgctacatcctcaccggcgatgagttcgatgccgacgaagccctgcgcatgcgcctgctcaccgaggtggtggaacccggcgaggaactggcacgggccctcgaatacgccgagcggatcgcccgggccgcgccgctggcggtgcgcgccgcgctgcaatcggcgttccaggggcgcgacgagggggacgatgcggcgctgtcgcgggtcaacgagtcgctggccgcgttgatcggcagcgaggacgtccgcgagggcgtgctggcgatggtgcaaaagcgcgcgccggcgttcaaaggccgctagctcccctgcgggtcgacccccggtcgctccgctccatctctcctgcggaaaccgacatgacttcgttgactcaacattccgcagcgccggtgcggatggaacgcctggccctgcccgcgaccgacggctatccgctgtccgcctaccgctaccacgcgccgggccacgcccatggcaacctgctggtggccggcgcgacgggcgtcgcccagcgcttctaccggcgtttcgccgaacacgccgcgcgccagggcttcgacgtactcaccctggactatcgcggcatcggcgaatccgcgccggcaagcctgaagggcttcgccatgtcctacctggactgggcctaccaggacctcgccgccgccgtcgagctgctcggccgggaggagcggccgctgtactggatcggccactccttcggcggccacgccatcggcctgctgcccgaccatgggcggctcgccgcctgctacagcttcggcagcggcgccggctggagcggctggatgtcgcgccgcgaagcgctcaaggtgcgcctgctgtggaccctggtgctgccgccgctggtggcctggaagggctacatggcctggagcctgctgggcatgggcgacgacctgccgctgggggtctaccgcgactggaagcgctggtgccgccatccccgctactatttcgacgacccggcgatgcgccacctccaccagcgctacgccgcagtgcgcacgccctgtctgttcgccaccgccctggacgatccctgggcaccgccgcgctcgcgggacgccttcgtcgaggcctaccgcaacgcaccgctggaaaccctcgacctgcgacccgacggtggaccgctcggacacatgggctacttccgcgccggtgcagaggcgctgtgggacgacgccctgcgctggctgagacggcatccggagaacgcctgaaagaccagcgagagcgcgccatgcacccgttgccgttgtcccttcgcctgttcgccgtcgcattctggctgggcgtggtcgccgtggagttcctgctcgaacgcagccgcgccgaaagccgcgaccggggtttcgccgggagaccgccaccaaggccgacagctttgccggggtgaaccgctactcccggcagatcgcccgcatctccctgctggccatcccggccgggctgctggccctgggctgcggcccgtacctgatgcgacaacgctgaaaaatccgccgactgtccatttcgcgacgatgactggcgcttttgccggcgcaggccgcccgcgcctgccttaccgttccccgctctttcagacacgggagcagggcaatgccgcttgccagtcatctgcgttgcgtggcgctggcgctggggatctccaccgcgctgggctgcgcgaaccgcaaccaacccgcgccacgcgcggaaagcctcgaccctggcctgtcgagggtggcgggaacccgcggcgacgcgctgcccgcccagtggtggacgctctaccaggaccctgggctgaaccacctggtggccgccgcgctgcgccacaaccgcgacctggccgcagccgatgcccatgcccgcgcgctcctcggccatctgcgcggcgcacagggcgaacgctggccacggaccgaggtcggctatggctaccagtatgggcgcgacggcgacgaccagaccctcgccgaagccaccgacgaggacctgcacagccagtggaaacacaccgcccgcctcgacctgtcctaccagttggacctgtggggcgaagtccgcgcccgcatcgccgcggcgaaggcggatgccgaagcggcgcaagcggcgcgcgacctgctcagggtcagcgtggccagccagaccaccctcgcctacgtccgcgcctgcgccctggcgcgacgggcagaggtacaacgccgatcggtcggcctgctcgacgcgagcctggcgctgagcgaacgccagctcgccgccggcctttccagcgagctgcagcgacgccggctgctggccttgcgcgagcggacccgcgccgcgctgccgatgctcgaggcgcggcggcgcgcggcactctacgaactggcgctgctcagcgggcgctcgccgcgccagttggacgctcctgccgcgacctgcgccggcataccgcaactgcgccgtgccctgcccaccggcgacggctggagcctgctggcgcgccgcccggacgtccgcgcggccgagcgccggctcgccgccgccgacgcccggcgcgcgctggccgaagccgagctgtacccgcgcatcagcttcgccgtcggcgccgagacctccgcagtgaccctcgccggcctcggcggcagcggcgcgctggcctacgcggccggcccgctgctgagctggcgcttccccaaccgggaaagcgcgcgaggccgcctggacagcgcagcggcagagcgcgacgccgccctggcgcgcttcgacggagcggtgctcggcgccctgcgcgaggtcgagcgtgccctggcgctgtatgccggcgagcgccagcggcgtgccgacctccagcgtgccctcgacgagcagcgccacgcctaccggttggcgcgcagcaactatcgcgccggcgccctcgatgccctcgagctgctcgacagccaacgcagcctggtcgccgaccgggcgcgcctggtcgacgccgagatgcgcgtcgccgagcgccaggtcgaactgttccgggctctcggcggcggctggcaagccgctcccagcccctcccatcaggaaaacggacaatgaaccaggcaatcagggaacccatcgaacacaccactggcgaaaccatgccagcagccacgcgccggcgccgaacctggctgctgggcggcctcgccggcgccatcgcgctcgccgccctgctggcctggtggtggagcagcggacgcttcctggagggcaccgacgatgcctatgtacgcgccgactgggtggcggtcagcgcgcaggtctccggctacgtcgccgaggtgctggtggccgacgacgccgacgtccaggccggcgacctgctgctgcgcctggacccgcgcgacttccgccagcgcctgcgcgccgccgaggcccgcgaagcggcggcgcaggcggcgctggaagcccagcgcgcgaagctggagaccctcgatcggcaactgctggagcaggcgcagacgatcagccgcgcccgcgccgatggcgaagcggcgcgagccgaatggcgccgcgccgagaccgactggcgacgctaccggcaattggccgacgagcatgccaccagtcgccagcgcctggagaacgccgacgcggcgcaccagcgagcgcgggcggcggcgcggcgggcaaacgccgaggaaggccgccagcgcgccgccagggacgtactgaagagccggcgacgcgaggcggaggcggcgctcgcccagcgccaggcggagctgcaggaagccgcggcggcgcgcgaactggcgcgccacgccctggacgataccgaaatccgcgccccattcgccggccgcgtcggccagcgcaaggtgcgcctgcgccagtacgtcacgccggggctgccgctgctggcggtggtgccgctggagcaggcctacgtggtggccaactacaaggagacccagctcgaacgcatccgccccgggcaaccggtagaactggaagtggacacgttcggccgccgctggcgcggccgcgtcgacagcgtggcgccggcctccggcgcggtattcgcgctgctgccgccggacaacgccaccggcaacttcaccaagatcgtccagcgcttcccggtgcgtatccgcctggacgccgacgccgccgagcggggccggctgcttccggggatgtcggtgatcgccaccgtggacactcgcgaaccggacggagcctccgccgatgagcgctgacgacaaggtatcgctgcgtgcctgggtcgccgtcaccggcggcctgttcggctgcttcatggccggcatgaacgtgcacgtcaccagcgcggcgctgccggagatagaaggcgcgctgggagccaccttcgaggagggctcgtggatctccaccgcctatctggtcgcggaaatcagcatgatcccgcttaccgcctggctggtggaagtgttctccttgcgccgggtgatgctcctcggctcgctggtgttcctgctcagttcgctgagctgcgcgctggcgccgaacctgtcgacgctgatcctgatccgggtgatccagggggcttcgggggcggtgctgatcccgctgtcgatgcaactgatcctcaccgagctgccgtccagccggatacccctcggcatggcgctgttcagcctttccaacagtgtggcccaggccgccggcccgtcgatcggcggctggctggcggatgcctattcctggcgctggatctttctcctgcaactgttgccggggatcgccctgctggccgcggtggcctggtcgatccgcccccgcgacggcgaccgcgaacgcctgcgccaggccgactggctcggcatcggcgcgatggtcgccggcctcggcgcgctgcagatagtgctggaggaaggtggccgccgcgactggttcgagtccggcttcatccgcaccttcgccgtcctcgccgtgctcgccctgctgctcttcgtacagcgccaactgtggggcgcgcggccgttcatcaacctgcgcctgctgggcagctacaacttcggcgtgtccagcctggcgatggcggtgttcggcgcggcgaccttcggcctggtgttcctggtgcccaactacctgtcccagttgcagggtttcaacgcccggcagatcggcgacagcctgatcctctacggcctcgtgcaactgctcctggcgccgctgctgccgcgcctgatgcgctggctgaaccccaagctgctggtggccggcggcttcgcgatcatggccctgggctgctggatgggcgcgcacctgaacgccgacgcgggacgcaacgtgatcatcccctccatcgtcgtgcgcggcatcggccagccgctgatcatggtcgcgctctcggtactggcggtgaagggcctggacaaggcccaggccggctcggcctcggcgctgatctcgatgctgcgcaacctcggcggcgcgatcggcaccgcgctgctgacgcaactggtctcgctgcgcgagcgcttccactccgagcggatcggcgagaccctgacgatcttcgacggcgccctgcagcagcgcctgggcggtggccaggtgcagatacaactgccggagcagcagcaggcgctggccctgctcgaccacggggtgcgccagcaggcctacctgatggcctactccgacgccttctacctttcctgcgtggcgctcctggcctgcgccctggcctcgctgatgctgcgccagaaggactgaactcagtcgccctcggccaccccgtaggcggcgccgcggccgaaatagaggctcggcgaaacgcccagggtccggcgaaacatggcgctgaaggcgctctggctgtcgtagccgaggtccagtgcgacctcgaggatcgagtgccctgccgccagcgcatcgaggctggcgagcaggcgcatgcgccgcagccactggacgaagctgagaccggtttcgcgctggaaggcgcgggtcagggtccgcgggctgacgcccaggcgacgcgcggcatcgcccaggctccagtcggcggccggctcggcgcgcaggctgcggcacagcgccgccagtcgcggatcgaccggctgtggcacgtgcagggcgaggatcggcagcacccgcagttcatcgaggatcagctccatcacccgctcgtcgcggccacccggcgggtagtccggggcgatccgcatcgccgcgacgatcaattgccgcagcaacggcggcacgtccaccacccggcagtcccgcggtaggtcgtggcgcgcctgcggggcgatgaacaaggtgcgcatgcgcacctggccggcgaaacgcagggcatgctcgataccggccggcaaccagacaccgcgtcccggcggcaccacccaggtgccctcggcggtgccgaccgtgaccaccccgctgagcgcatggatcaattgcgcgcgcgaatgccggtgcagctcgacgcgctcgccgtggagataatcctgggcataggcgaagaccggacgggtggaaggcaggtcgatcagcatcgggcgggccttggcgggcagtgggggcgctgtctttttaccagccgcgccatgctaacgaccagtcccggcgaagcacgccggcgctcgccgcgacgcggcgagcgcgctaccctggccgccccggcgtggcgcgactacctggcgtatccgccgcgccatccctccccaagtacaggagcgaaaccagcatggcctcttacgcggaactgttcgatatcggagaagacttcgccgccttcgtcggccatggcctggccacggaacagggcgcggtcgcgcggttccggcagaagctggaaagcaacgggctgccgagcgcgctgacggaacgcctgcaacgcatcgaacggcgctatcgcctgctggtcgccggggaaatgtggtgcccggactgccagatcaacctggccgcgctggacttcgcgcagcgcctgcaaccgaacatcgagctggcgatcatttccaagggccgcgccgaggacgacctgcgccagcgcctggcgctggagcgaatcccgattccgctggtactggtgctggacgaggagttcaacctgctcggacgcttcgtcgaacggccgcaggcggtgctcgacggcggtccgcaggcgcttgcggcgtacaaggcgggcgactacctggagcacgccatcggcgacgtcctggcgatcatcgaaggcgcggcgcgctgagacagcgcctgcgcccgcttctcagtgccgcgaacagcccgcgccaaggcctcggtactgcaagcgatgtaggcgtccggcgctgtcgcggtagagcatctccagcggcaccacgccacaggtggccggcaccggcgtgacggaaagcacccgctcgatgtccagcggcatgccgtagtcgtagcgctcgatcggcggcaactctttcccgtcgtcgtccgccgcctggacctgggaccagcaggacagcagcaaggccagcaagaacgaggttttcatgaggtcttttctccatgctgcgccccgtcggacgagacgctttgcgaataggcccggagcaaccaggcgaggtcggtgaggatcgcggccaggcgccactcgccggcggccgccaggcgggcgccggcacggcgtgcgtgccgcgcggcgagcggcggatcgcgatggcggacggcgatggctcgcagtgcgcgctcgatccaccgcgcctccgcggcggccgggtcgagcccggccagggcgcgccacaggcgccgcgactcgcggccgagttgcagggatacgaagcccaggcgcagggccagcgcgctgcgcggatgttccatgccatgcagcgcgcccagctgggcgatgcgatgctgctggcgggcctgccaggcatgcgcgtcgaaaccggcgcgacgacgcagcaaggcgagggtctcgcggcgcagatggtcgagcagcgacgccgaatgccgttccaggtccttcggcagcaggcggtaaaccagcaggctgatgcagagcgccagcacccaggcgcaggactggttggcgaagtcgccgaaatcgaagcgggcgagattgccggtggcgaccagggtgttgaaggcgatcaggtaggcgattccctgcaacgcccgcctgggcactgtggtggcctggataccgaacgaccagaagaaggcgaggcacagcagcagcaatggaaaaccgttgatcagcggtagcagaaggaatttgcagagcaatgcggcaggtatcgcgtagagcgtgccgcgaatgaaattgcgcgtgccctcggcgggaaagggcgaggctgccagcagcgtgcagtaggggccgagcaccgccagcagggccggcccctggtcccacccgctgaggaaccacagggcgccgccgaccagcatcgccagccaggctcgcgcgccgttgcgcaaggcctcgcggtaatgtcgatggaaggccgctgggcggacgtcggcgcgggcccggccgtcgagccgggcgaacccccgcagggcggcctgcaggtcatccagttgctcgtcgagacgctccatgaacagcccttcgcgacaggcatccgcttggtctgtcggaagtccgcgccgaatcgccgccaggcgaccgcgcaagctcgcgagccgtcgcgcggcgccggcgaagtcgagctcgccgcgctccagttggccgcccagcaggcgcaggtcgtcggccatcggcagcgccagtccacgctccgccaagcgccgggcccaatgcgtctcgccggcgaagcggaactccatcagcgtggaaaacagcgccgccaggccaccgcggatcgccgggagcgcagcgctcagcgcccgcgactcggctcgaccgacacccagcaggtcgtctaccgcgtagacctcgccggccagcgtccggcgacggcgctccagttccccgtcagccgcaccggcatgccgcgcagcgaccagcgccagcgtcgccgcgcagagcgagacgagacgctggcgcacccgcccggacacggtcctgcggctgaagagcacggtcaccaggctcaggcagcagaccccgacgattaccgccgaggcgcgggtgacgatgtgctcgaaggccgcctcgggctcgaccatggccggtcccagcgccaggcacacggtgtagccggcgaccaccgcggcggtggcgtagaagtgccggaccaggctcatgacgccgacgcagagacccagccagaaacccagggcgacgacgaacagcagcatcttctgggcgaacagcgcggtcaggacgaaggcagcgagcgtgccgaccagggtacccacggcgcgccaccagcccttgccgaccaccgctccctgcaccggattgatcagcaacagcacagtggacgccgcggaaaacggcgaatccagttgcaggtagagccccaggccgagcgccagagcggcagcgccgatgctgcgcagcacgtagtccaggctgtcggtccgccagggcaacggcaacgccgcgtaccaatcgcgcccgccggacgccgacgccgccatcaaaggtactcctgcaaccagcgggtcagccgccagtgccgcgcggtccccgcctgcagcacctcgacactgccggtcatgccggcggcaagcaccacgcccgccggtacccggtcgagttcgatgcgcaccggcacgcgctgcgccaggcgtatccagctgaagttcgggctgacctgcggcaggccgctgtcggcacggctttcgttgaggtcggcgacaccgcgaccgatgctcgcgacatggccgtcgagcagcggatcgaaccccatcagcttgattgtcgccggcgcgccgacctgtacattgcgcagcttggtttcctcgaaatagccggtgacccagaagcttcgccgatcgacgatgaagatgttggtccggcccgccgccgcgtaatcgccgggctgcacgcgcaactgcgtcacatagccgtccaccggcgagcacaactcgctgcgccgcaggtccagccgcgcctggtcgagcgccgccccggcggcctcggcgcgggcgcgggcgatacgcagggcgcgtccggcgttggcgacctcctcgcgcgaaaccgcgccggccaactgcatgcgtcggcgccattgctcgtcacgttggcgcagggtttcccgcgcctgctccagctccgcctcgcgctggcgcacggccaggcgatagctgcgcggatcgatgcggtacagcggatcgccgcgggccacccgctggttatctgcgacgaacaccgcctcgacgctgccggagacttccggcgcgatgcggatcacctgcgcgctgacccgcccgtcacgggtccagggcgccagcacgtaggcttgccacaactgcaacgccaggcacagggcgagcaggccgcaggcgaaggtcgcagccaccttggaaagacgaacgatggacatggggacctcggctcagaacttcagcaccagcacggacagcacgatgaacgacaggaagaaacgcagcaggccgggatgccaggcgcattccagccagcgccaggcgaggcgctccagcagcaggtagagcggcatcgccaggcacaggtagaggaacaatggcggcacgtagaggccggaaacggagacttcgctcagcatgcagggcaccagggtatcgagggcgcggagcggtcggccgctcctgtcgggttgaggagcacaggctacgggtcgtggcgatttgcaaatatcgactactcagccagaaaataatcgaattcggacaaccacaggacctgccgtgagccgtgaaccgcagacctacctcgcccaacgcttcgatcccgacgcgctcggccagccggccctggccctgcagctggaggcccggcacaacgacaccgaagtgccggtgcaccggcatcgcaagggccagctggtggtggcctgccgcggcggcatcacctgcacggtgcccgatggcctgtggatggtgccggccgggttcggtgtgtggattcccggcggcatcgcccatagcaaccgggtcaccgccaacggcaaggtctgcttcctcttcgtcgagccgggggcggcacgcctgccgagcgactgctgcaccctggccctgtcgccgctggtcctcgaactgatcctgcacctgagcgcgcaaccgcaggactatccgcacgacggcccgctcgcacgtctcgccggggtgctgctggaactcctggaacaggcgccgaccgaacagctctacctgccgctgccggacaaccgcggcctacgccgcatcgccgacgaactgacccgcgcccccggcgaccgcgccagcatggccgaatgggccaggcgagtggcgatgagcgagcggtccctggcgcggatggtgcgccgggagaccggcatgaccttcggccagtggcgccagcaattgcagatcatcatcgccctgcagcaactgtccgccggcgtttcggtgcaacgcaccgccgagatcctcggctacgagtcggtcagctcgttcatcggcatgttccgcaaggcgctcggcagccccccggcccgctacgtgcgcgacagcatgcggcggccagccgactgaacgaaggtcgacggaaaggtcttgcagttcgtcagctgttctcccccgaggctggcactcgaagacacttctgggaataatgccgcccttttttctccaggaggatcagatggttacgcacttcttgagcgaatccggccaggcagcctgcgggcgcggcgacagcaacgtgaacggctcgagcgacgtcggccaggtcagttgcaagacctgccggcgcaccaacgccttcgcccaggcccaggaaaacgccgctccggccagtgcccctgtcacccccaccgccgctgcgccagtgatcgacaaggccgcgccgcggccgaaagccgaggccaggctcgccgccgcgcagcgccaggaccgcgatgccgcccgcaaggcctggcaggcgcgtctcaacgaattgtccgggaagaaccgcatgccgcgctcgcggcgccgcgcgcaagcctatctctgagcggtagcggtacttcgcggcggatgtccgcacgcggtcatatccgtcctgcccagcacaaccgcgcgtcccctcatcaggccaggccctgcgcctccgccagggccaggccgtcgagggcgccggcgagcatgtccggcagatggcgcggctcgtcggccagctcggccagctccgacaaccgatgcgccgccgtcagcaaggcgatccgccgacgctccaggcgccgaccgctgaagcgctcgtaggcgacgacgatgcgctcggtgaggtcggcatcgatgaacgcggaatagatgaattcctggtgcagcggaccgatgcccgcgtcggcgaagtcgtacacaccgttcagccgcccggcctcgctatcgaatgccatgttccagccatggccgtcgaagaagccgaagatcgaacccagcggatcggcaggcagcttggcatattcccgcaccaagcgttccgcgcgttcgcgccaggccgcaggcagcagcggcaaggcgcgcctgcgcatcgccgcgggcgactcccagggacgcaccggcaaggctccaaccgcccgcatgcgcgccggtggcagtcgatgcagctcggcgtagaagcgccccaacgcatcgccgaccgcctgccgtgcgggttcgtccaggcgccggtagtcctcgcccaggaggtaaccgccaggcagtttctcgtggcgggaaaacagcggcggtcccgcaaacacctgcggcgccggcaccggcaggctcaccgccggacgcaccaggcgtagcacggcggcctcgcgcagcagcgccgcctcggcctccgcgccgcgcggaaacttgaacacccagcgccctccgacctccaccgccgtggaatgccagcccgaggccaggatggcgaacgtagcgtccgccagctccggacaggccgccactatcgcccggcgatattcctccagggcacgcggttccttcaccgacgactccgcgcgaccatcgccacgatcgcctcgtacagttcccgccgcgcctcttccggggcgatctcttcggtggcggccgcgtgcgacagcgcttcggcggcgccgatcattgcgcgcagagcggcgacggtcagccgtccgccgccggcgaagggctccagcacggcgcggcacttgtccatgaagagaacctcgtagtcgcgcttgatccgctccagctccggcgagctggcgagggccgcgaccaccccgggaatctcccggccttgttgcatcacgcagtcgacataggcgcgggcgatgacgtcggcgcgcccctccagggtcgcctcgctcgcttccagggcagcctccatcagcgccgtctggcgcaggtcgtaatcctggtagagcgccgccagcaggccggcgcgggtgccgaagtggtcatagaccaccggcttggtcaccccggcctgctcggccaggcgtccgagggtcagcgcctcggtaccttcttcgcggaccagccgccaggccacctcgagcaactggcgctggcgctcgtcgcgggacaggcggcggcgtggcgacgggtcgtctggggagtgcgttgacatagataacctactaaaagtaacttactaaaggcaacctacggaaagtaggttttacccagactatcgacttgcccccccttcccgcaattcccggaggaattcgcccatgcatgccctgatcgtcgtcgcccatcaccatcctcgctctctcacacatgccctcgccgcgcgcatcgccgaaggcgtggtccgcgccggtcattccgcggaaaccgccgacctggcggcggaaggcttcgagccgcgcttcggcctggccgaccacgccgtgcatcgcggccaggcgtcgcctcccgccgacgtcctcgccgagcaggcgcgcatcgatcgcgccgataccctggtgctggtctacccgatctactggtggtcgatgccggccctgctcaagggctggatcgatcgcgtgttctccaatggctgggccttcgactacagcatcggcggcgacctgcggaaaaagctgcagcgcctgcgcgtggtgctggtcggtgtcggcggcgccgatgccggcaccttcgagcggcacggctacgccggggcgatgcgcacccagatcgaccatggcatcttcgattactgcggcgcacgggtggtccgttccgaactgttgctggagtcggagagcgccgatccagccgcgcacctggagcaggctcggcgaatcggcgccgagctgttcgccagcgcccggcggccgacgccggcctgagcccgccgcaggcgactcaggcacgtgacatgtgcttggtcacgcaatggatgccgccgcctccggcggcgatgggatcgatgttcagctggacgatgtcccgccccggatacaggcggcccagcaattccccgcagtggcgatcggcgctggcgtcgccgaactgcggggcaatcaccgcgccgttgatcggcaggtagttgatgtagccggcggcgaagtccgggttgtttcgcgagtagtcgcggcgcggcttcaggggcggcgacagggtatgcacctgcagagcgcgaccgtcggcgtcggtggctgtgcgcaggatctccaggtgttcgcgggtcacggcgtagtcgtaggagtccgggtcgttgtcgagattggcgatgaccacgcccggcctgacgaagcgcgcatagaagtcgacatgcgcatcggtgatgtccctgccgcggatacccggcagccagacgatcttgcgcaggccgagcagggctttcaattcggcctcgacctggcccttgtccatgccggggttgcgattgtcgttgagccagcaactttcggtgaggatcgccgtgccacgcccgtccacttcgatgccgccgccctcgccggtcagttggctggcgatgtagcggacctccagtcgctcgcttagcacgccggcgacgcggctatcgttgccggcctgctgcttgccgccccagccgttgaagttgaaatccaccaggcccgcttcgccctccccgttcagcacgaagcagccgccgtagtcgcggacccaaatatcgtccagcggcaacgccaggtagtcgatgttggcgccgccgcatgcgcggcgcgccgcggcctcctgcgcgggccggcagagcagcgtgaccggctggtagcgggcgatggtcctggccagcagggcgacgctgcggttcacgtcctcggccaggtccttccagatcgacggggacgcggcataggcaaggaacacccgttcctgcggcaggtgctcgtcgggcatatgccagtgatcggctgccgccgcctgtccacgcggcgagccgaactccaggccgagcgtgagggcggcaccgaggccggcgctggcgccgagtcgctggaggaaatgtctgcgggtcatcatttcgggtcctcgggaacgggatcggaacgggtggtcttgaaggtagtccaggcgcgcatccgcgcccgcatgtcgcgctgcgggatgtcctggccgggaaacagccgggcgtaggtcgccgcgtccggatagatgtccgggttgtcgcgcatgtcggcggataccagggcccgcgccccggcgctggaggtcgggtagccggtagcgctgctgatcgcggccatgttctgcgggcgcatgatgaagttgatcaacgcataggcatattccgggtgctgcgcgtcgaccggaatcgccatgctgtccatccacagagacgtgccttcgcgcggcacccggtagacgaagcgcagtgccttgccggcttcgtcggcggcgcgctgggcctggatcgcatcgccgctgtagcccagcgacaggcagatctcctcgttcaccagttgcgccaccggctgcgactggaacttgcgaatgtagggcttgatgcgctgcagcaaggccagcgcggcggccaggtcctgcggcttgccgctgcgcggatcgcgccccaggtaatgcagggccagcgccagcacttcgtccggcgagtcgatcagggaaatcccgcagtcggcgaatctcgccgccaattccggcttgaacagcaggtcgaggctgtccagcggagcgtcggccaggcgccgttcgatctgctcgcggttgaaggtcaggccgatggtgccccaggtgtagggcaccgcggcgtcgcgcgaacgcgcgtagcgggcttgcagttcgcgcaggcccggctcgatctcgtcgagatgctccaggcggcgggggtcgagcttctgcagggcgccggcgcgcatcagccgctcggccacggtatcgccgggaaagataaggtcgtagccgctgttccccgacatcaacttggcctcgagggtctcgctgctgtccatcacgtcatagaccacgcggatgccggtttcccgggtgaacgcggcgagggtatcgggcgcgaagtagtcggcccagttatacaggcgcagcactttctcttccgcctgggccacgcccaggcccaggagcagcgcggcgagcagcggtcgcgcggaacgtttcatggggacacctcccaggcgtgtcggctggccgggtcacgcccgtccaggctcatcagcgggccatacagctctggccgccggtcacgatagacaccccaggccaggcgttcttcgcctatcgcatcgaggtcgaggccacagaccagcaccgcctcctcgtcgcggccggccgcggcgagcaaggcacccttgtggtcggcgatgaaggacgaaccgtagaaccgcatggccagcgccgggtcgccgcaagcgacctcgcggccgatccggttggcagccaccagcggtaccagattggcggcggcctggccgcgctgggcgatctgccagtgatcgcgggaatccagctgcgcggcgccaggctcggagccgatggcggtaggaaacagcagcacctcggcgcccagtagcgccaggcagcgcgcggtctcgggaaaccactggtcccagcagatgccgacgccgatacggccgaccgcggtgtcccagacgcgaaagccgctatcccccggactgaaatattccttttcctggtagccgatggcgttggggacgtgggccttgcggtagacgccgagcaaccggccatcggcgtcggccaccgccagcgagttgaagcgcgcgttgccggcgcgctcgtaccagctgagcggcaggactacgccaagctcccgcgccaggctggaaaagcgcgccagcacccggctgccacggaaggtttcggcgaggcgcagatggcgatggtcctgctcgatgcagaagtacggggtggcgaacagctcctgcaacaggaccagttgcgcgccccgggcagccgcttcgcggaccaggcgctcggcgcggtcgagattgtcgtcgagactccagctacaggcgaactgggtagtggccagggtcaggtggcgcatcgctcacctccgcgccggccaggccggctgctgctgggtgatgcaatgcacgccgccgccgccgtgggccaggtggtcgatgcgcaccggcaccacctcgcgagcggggaaggcccgggccagggtcgcggcggccgcgtcgtcggcggcgacaccgtaggccggcatgatgatcgcgccattggcgatatagaaattggtgtaggaggcacagaacaccccctcctccggagccacttcgccggcatcgaacagttcgatcagctcgaaacgccgaccgcgggcgtcgagcgccagctccagggcgcgacggttctcccgcaccacctcggcgtaggcggaggtggtgtcgcgggtggcgtccagcaacaacgcgccgggccgggcgaaggcacagacgccgtcgacatggccatcggtcatgtcgcctgtgatccggtcgggatcgccgggcaaccagatggtcctggtcacgccgagcaggcgggcgaacaatgcctcgatctcggccttgctcaggccagggttgcgattggcattgagcagcacggactcggtggtgatcagcgtgccctcgccgtccacgtggatggccccaccctcgttggccagcggcacgccgaaacactccaggccgaggccatcgagaatccgccgcgccaggctggcgtcctgcgcgtaggcggactttccaccccaggcgttgaaacgccagctgacaccggccaacccgagttgcggatggcagacgaaactcggtccggaatcgcggcaccaactgtcatcgatggccagctcgatgagttcgacattgcccgcgcacagctccccggccctgtccagcgcggcggggtcgaccaccagtttcaccggttcgaaacgcgcgatggcgttggccactgcggcgaagtcctgttgtacgtccgccaggctcacgccccattcggactcccagagcatccgattgtgcggaaaagccatccaggtggcggcatggggagtccattcggcgggcatgcgccagcctgtgtcgagcgtattcatgggtcggcttccagtaagtattttttatctggcggaataggcgtggattgcctgaagaaatgctatggctaggcatcaggctcaacaaacgataaattctgcgcaaacctaattagcccggcttatcagcaatgctcaaacactggcccccactgaatgcccttcgtggcttcgaagccgccgcccgcctcggcagcttccacaaggccgccgaggagctgcacctcacccagtcggcgatcagccagcagatccgcagcctggaaggctatctcgagcaaccgctgttctttcgcaacggacgcaaggtgagcctgaccgacgctggcttcgatctgctcagcaccacccagtccctgctccagcaactggccgcgggggtccgtcgcctcgaccagtaccgcaagcccaaccagttggtggtcaataccaccccggccttcgcccgccactggctggtgccgcacctgggcgatttccatcgccgtcacccacaggtggacctctggctattgaccaccgacgaggtacccgagatggccagccagaccatcgacgtagccatccgcgacgacctttgcgcccaggccgaatgcagctttcgctcgctcctcgaagaccgcctctaccccgcctgccatcccgacctgctggcgctgccggcggaacggcgcggcaccctgcacggcgagcgcgaaatggactggagccactggcaggtacagggcggcgcgaacgttggccaacgcagtgccggcctgaacttctccgaccccggactgctgctggaggccgccacccagggcctcggcatcgcgctggtcagccagttgctggccgcacccgcgcgagccgccggacagttggtcgcgctctgcgaacagaatgtccgcgggcccgaatgggcctggctggtgcaccgcgacagcgaacgcaacagcctgacccgggcattctgccaatggctggaagaaaccattggcggagcatcgcgcacagcccccggacggcgcggataacgctcactccaggtgtatggcgaaaccgacccgctgcggggtgagttcgtcgcgcagggtcagcgccgggatcaggtggtcgccgccgttctgccggcggaacgggatcggcgcgcagcgctgcaggtcatcgaggcgccggccgcgccgttcgatccgacgcagtcgcggcatacctggcgcgtcgccgccaccgactacgccgagtcggcgatcctcctgccgatcctcgccagtcttcgccgccaggcgccgggcagccgcctggcggtgctggagctggcgccgccgcgaatcgtcaggcaggcggaacgcggcgatacgcttcggtcgtcgccgcggtttgacgcaccgtcgcgctttgcccaagctagcgggcttcgatccaccaccaggaagtccttggcgtgaagtttccgttccatccctggcgccgcctgctgctctgcgcgctccctttcgccgccctgctgaccgcatgcgacgacggcaagaaagagcccccgcccaaacccgccgaagtcaccacctacaacagcgtgccctgggacgccctgccggccaccagcgacgccgacctgctcgccggcttcaatgcctggcgctcggcctgcgcgcggctggccaaggacccggtatggggcgagccctgtgcgagcgccacgacggtcgccgccgatccgacggcggtgcgcgcgttcctccaggagcggatgcaggtctatagcctgcgttcctccagcaacggcgaccagggcctgatcaccggctactacgaaccggtctaccacggcagcctgagccagggcgaaaaaaacccggtgccggtctacggcgtaccggacgacctggtggtggtcgcgctggaaagcgtctacccggaactcaagggcaagcgcctgcgcggacgcctggaaggccgggtgctgaaaccctacgacgacgccgcgacgatccgcgacaacggctccagcgcgccggtgctcgcctggctgggcgacccgatggacctgcagttcctgcagatccagggttccgggcgcatccagctggaagacggccggcaactgcggatcggctacggcgaccagaatggccacccgtacaagccggtcggccgctggctggtcgagcagggcctggtgccgaaggaagagatcagcatgaagcgcatccgcgactgggccgaggccaatccgcagcgggtctccgaactgctggcgagcaatcccagcttcgtgttcttcaacctgcgcccggacagcgacgaaggtccgcgcggctcgctgaacgtaccgctgaccgacggctacagcgtggccatcgaccgcaaggtgattccgctgggcagcctgatgtggctgtccaccacccgccctgacgacggcagcgcggtggtccgtccggtggcggcccaggataccggcggggccatcgtcggcgaggtccgcgccgatctgttctggggcaccggcgacgccgccggcgaactcgccggacacatgaagcagccgggccggctctggctgctatggcccaagggtgcgccgctgcccgcctcctgaaaacctccggccggtgccgacgcacccggccgggacggctggccaacgcaacgccagcgagcgcccgacaccgccgaccagcatcgacggcgccgggcgcgcttgcggcagcaaccattcaaacgatgaatgacgccgcagaatcttctgtgatgatcgccgcgccagccggacctccgcgcctcgccgcagcggccaggccccccgaaaccacttgtccgtgctacccccggcaggcgtagccgcggccgcctgcctcggcaaaaagccatcagccggcgcgcttcgacgcccctcatggcgccctttcgccaactaccaattctcatagttgtgaggggaaatttgtatcttattttaaatacccacgaaacatataaaaacacacacagcgaaacacttcggaaacccaacgcaaggtggaagtgcaatgcgtgaccgtgaatccattctcatcgcttttctctctttcctgacgataagactgcatggcagcagttgactgcccttgagtcgacggcactccgtatttccataacggtttttccgggcaaggcgcctcgacgcttgccgctcgcgtgagcgagccggtgggcggcggacgactggcagagcccgggaagactcggtcgccgtcttcgcgaaaaaccaaaaatccttcatttagccgaagaagccggcagatggactcattttttcgaaaaaaggcgattgccagaatgtcccagaactccctgctcgacctgtacgcgcacccgacggtggtggcccgcttcagcgaaatggcagcgcttcatccccatcgcgaagccatcagggaccgtttcggaagtgtcgactatcggcaactcctagatagcgccgaacaactttcagactatcttctcgagcattatccgcagccgggagtttgtcttggagtgtacggcgaatattctcgggaaagcattacctgcctgctcgccatactgttatccggccatcactacttatatatagacctgaaacaaccggcggcctggaatgcagagttgtgccggcaggtcgattgccgcctgatcctcgactgctcgaccacgccgacgccggccaacggtcttccctgcgtcccggtcaggcacctgcctgccgctccagcctcggtcgcccggccatgcttcgcggcggaccagatcgcctacatcaacttctcctcgggcaccaccggccgcccgaaagccatcgcctgcacccacgccggcattacccgcctgtgcctgggccagtcgttcctcgcgttcgctccgcagatgcgcttcctggtgaactcgccgctgtccttcgatgcggcgaccctggagatctggggtgcgctgctcaacggcggctgctgcgtgctgaacgacctcggccccctcgacccgggcgtgctgcgccagttgatcggcgagcgcggagccgacagcgcctggctcaccgcctcgctgttcaacaccctggtggacctcgacccggactgtctcggcggccttcgccagttgctcaccggcggcgacatcctctcggtgccgcacgtgcgccgggcgctgctgcggcatccgcgactgcacctggtgaatggctacggaccgacggagaacaccaccttcacctgctgccatgtcgtcaccgacgacgacctcgaggaagacgacatccccatcggcaaggccatcgccggcaccgcggtgctcctgctcgacgagcacggacaggagatcgccgagcccgaccgggccggggagatcgtcgccttcggcgccggcctggcgcagggttatcggaacgatgcggcgcgcacccgcgccagcttcgtcgagttgccctatcgcggccgcctcctgcgtgcctaccgtaccggcgaccgcgctcgctacgacgagcagggccggctgcgcttcatcggccgcggcgatggccaggtcaagctgaacggctatcgcctcgacctccccgccctggaacagcgcttccgccgccagccgggcatcctcgactgcgccctgctggtccgcgagcgcaacggcgtcaagcaactgctctgcgcctggacgggaaaagccgacgccagcccgcaggccctgctccgccaactgcccacctggcagcgcccgcatgcctgcgtccgggtcgaggccttgcccttgacggcgcacggcaagctggaccgcgccgccctgctgcgccgcctggaagaaccgctggagcgctgcgccagcgcgctcgatcccgaccaacgcggctgcgcgcagctgtggagcgaattgctgggttgcgaggtcggcgccgccgaccaggatttcttcctctgcggcggcaactcgttgctcgccctgcaactggtcgccctctgtcaatcggcgggtgcgggagcaaacctgggactcgccgacttgcaggcaaactcgcgcctcgaccagttcagccgtctcctgcgcagccacggcctggcgccggagcgtctgctggaacgggcggcgacgccggagcagccgctggtgctgtcgaggagcgcggcatgaacgtcggtctctccgcggaggtgcgctaccactggttccgcgagcacctggtggtggtcggcgattggcaccgcctgtccccctccgagcgcgaccgcctgcggcaccaaccgatgccggatgaggccgcgcagtccttgcgcgtcgacctgtcgccctggtcctgcgggatggtcttcagcgagctgctcggcgccgacctgacccgcttcggcctctgctacctggctccggccgaggtgccggcatccgacctgacgcgcctggggcggcgcctgcgcgaagagttcccgttgctcgacagccaggtggacagcggcgcggaaggtttcgaactggtcgtccacgggcagcccgaggagagcccggcgctggaagtcggccccttcgccgacgaaaacacgctcatcgcagcgctgctgcaacgcccgcattccctgttcgagcgcggcctgctgcgactgttccacgggcgctgcggaggacgtgcgcgctggggcgtctggctgcatcacctggtcgccgacgccgacttcgccagcgtgctgctggcccgcctggccgtgctcaacgccgaccccacgaccgaagcggcggcccccgagttcggattcctccagcagcaatggcgcctggagcgccagctgcgcgagcgcaggaccaggctggaagactactggagcgagcgcggcgaggcgttccgtgaactggcgagcctgccctgggcggagctcgccagccattgcgaggatttccgcttggctgccacgccaggaggcggcgaagccgccctgctgacccggctcgcctgcgccctggctctcgccctggccagccagggcgccaccggcaaggtcctggcgctgaccccggtcagcctgcgcagtcgccgaggcacggcggtttccggttgctggctgaacctggtgccgctgttgctggacgccgcgaccgccgaggacaccttcgaacgacacaggctcgaggccttcgagcacagcctgctgccggcggaggccatcgccgaacgggccgggctgcgctatgccgacgcccaggtgatgatcaatgtcatcgaccagccattccgcagcgccgggttcatccaccggccgacactgaagagccgcctgccgctgaccctgaccctggtccggcgcgacgacggcggctgggacgcgagcctggccagccgcttcggccgcgaacggaccctggcgctggcggcggccatggccgaggcgctacgcccatgctgatcctgctgcctgacttcatcggccacccgagctgcttccgcgggctgctggcacgcctcggcgcaacggcctgccggctggtcgactaccaccggctggatgcctacgccagcatcgaagccctcgccagccaggtactcgacggcctggcggaagaaccggactggctgatcggctattccttcggcggcctggtcggctacgagatggcccgccagttgccggccagccgcctgctgatgatcgacagccacctgccctggccggccctgcggcgaatgccgccgagcgagcaataccagcgctggctgagcgccgagatgcgcgaatggatcgccctgatgagcgagcttggcgaactgcgcgaagaggtcctgctgcgcaatgtcgagctgttcggccgctggcagccccgccatcgcctcgcccgcgccagctgggtgcgctgccgggacgacgccggccgcgacccggccgccgaacgctggtgcgacctgatcgagcggctcgacaccttcccctgcgagcgtccgcaccacctggccctgcaggacccggcggtgatcgatttcatcgtccacaccgtcagcaaggagtccgtccaatgaaacactatcggcaggtggtatccccgcaattgcgccaacaggcgctggactggatcctcgccgcggcgcagcggccggacccggcgctggaaccggaattcgacatcgccgacgacgagcgccgcgaggcgaagaaggtgcgcaacctgcaccgccacgacccgctcttctgggacgactggttcgcccgctccgggctcgacgcgctggtccgcgaccatctgcgcaagccgcgcctgctgcgccacgcggcgttcatcaagcgccacgccgacgagtcctacatcccgctgcaccaggacatcgcgctatgggagaagcgctacgaaagtgcgcagaccttctgggtcgccctgaccccgtcgcggaacgacaacggtgggatgttctattaccccgacgaccgcacgatcttcccccacgagttcgacctcgcctacccgatgttcaagtgcatcgacctccaggccaacggcatttcccgcgagcaactggtggatgccgagctggacgccggcgacgtcctggtctggcccgcccgcaccgcacatggcagccacaacaaccgcagcggcgagctgcgcatcggcatgccgatcgtcttcgtcgaggacgacgaattccaccaactgaatcgagaggacagcatgaaaacctggatcgcttccaacctgaaaagcgtgttcccggacgaggcaatcaccgaggacaacctcgaccactatcttccgcagctgtgcgactactcgctgaagatggtcaccttcctcgcccgtttctcccgccagttcggtcatgcgccgaagatccacgacttcatcagggagccgcggctggcgacgctgtcggcctcggacgcgggagcgagacgatgatccgggtcatcgactgcaccctgcgcgaggggtgccaggcccgccagtgcagcttcgacagcgcgcagtcggtccagctggcgagggaaatcgcggcgctgggggtggatatgatcgagtgcggccacccgcggatttccgcggacgaacgcgagcgggtacgcgccgtggtggcggcggtttccacgccggtgctggcccacgcccgggcgcgccgggaggatatcgacgcggtgctggaaaccggtgcgcagtgggtcgggctgttcgcctcgatcaacgcgatctcgctggaaaccaagttcaagggcatgagccgcgaggaggtgctcgaactgttccacgacgcgatccgctacgcccgcgaacgcggcctgcgggtccgggccacggtggaagacgccgcgcgcacctcggtcagcgacctggtcagcatgatcgccaccgcgcgcgacgccggcgccgatcgcatctgcttcgccgacagcgtcggcatcctgctgccggacgagaccttcgacgtgctctcgctgctgcgccacgagttccccgacgtggtcttcgagtaccacgtgcacaacgaccgcggcctggccctgggcaataccctggcggcgatccaggccggggtccagtggcactcggcgagctgcaacgggatcggcgaacgcgccgggatcaccgacaccttccagttgctgaccctgctgcacaccaagttcgccgccgaccgcttcaacctgaagaacgtcctcgcggtctccgagctggtcgaggcgcacagccggatcaagcgttcaccgatgcacccggtggtcggcgagaacgccttcgtccatgtcgcccgcctgcaccagttggccatgcaggaaaaccaggacgcctacagcgccttcgatccggaactgatcaacggccgcgtctcgctgcaacgctacacgccgatgcaccgccaatccctgttcctcacgcctttcgagaaatccgccagcgaactgaagtaccaccgccacggccccggcaagcgcttcgtcatgctcgaccggcgcctgctcgacggctcgccgttctacttcatcgcccgccagttccacgacgtcggcgacggcgggccgggccacgtcgacagccacgtgcacaactgcgactcggtgttcctgttcctcggcagcgacgaggactaccgcggcctggaggtggaagtcctgctcggcggccaactgcgccgtttgcagagcccggccagcgtgttcatccccgccggcgtcgagcacagctaccgctacctcggcggcagcggcacctacatcaatttcgtccacaagggcgattaccacgagagcctactggagattacccaatgaagcagttcgacaagcacgcagacgcctacaacgtggtccgcggcaagatcgcctatccggattcgctctaccgcaacctcgccgaacgcgccccggcacgcgaagcggcgctggacatcggctgcggcaacggcgtctcgaccgtccgcctgcaaccctggttccgctacgtggaaggcagcgacctgggcgaggcgctgatcgccaaggcccgcgagaactacccggagatccgcttcagcgtgtcgccggcggaaaccttcgcgccgcaacgccgcttcgacctggtcaccagcgccacctccttctactggatggaccgcaagcaggtgctgacgcgcatggccgactggctgacccccggcgggctgttctgcgcctacaagtacgacttcccgatcgcctacgggccgctgcgcgacttcatcgagcacgaactggtgaacaagtgggccaaacaccgtgatccgcgcctgacccgctatgacgacaccctggagatcatgggcagttgcccgcacctgcgcgactgccgccgcgaagtgttcgccaacatcatcttcctcagcccggaggaggtcgcgctgttcttcctctccaccagctacgtgacccgctacatcgagcaggaaggcggcgaagactacgccgaccgcttcatcgccgcggtgcgcgagatcgagagcgcgccgcaggtggcggtgaacttcgacatccacgccttcaccgcgctgaatcgctgaggagccggcatgagcagcctccccgtacccgtatcgctcgacagcaccctccgccatctcggcagcgccgacccgcggcggccgttcctgatcgacgcccgcgagccggagcgaccgctggaatacacctggggcgacgccgaccgccaggtcgatgccctcgccgagcagatcgccgcgcatgcctgccgcagtgtcggcgtgctgctcgacaacagctaccgcaacctctgcctgatctatgcggtcatgcgcgcgggcaagcatctggtgctgatcgatcccgagtggggggaggccgcgaagcaggccatcgtcgacgagatgcgcctggacgcgctggccagcgaacatccgctcgagggcgcgctggccgggctgcgcctggcgctggacttcgagcgcagcgcgacgcgccggctcgaccgcgccgcgcacagccatatgatcctgttcacctcgggcaccaccggccagccgaaaggcatcgaactcagccagcaggccatgctccatgcctaccgcatcggccgcgactgcctgggcatcggcgagcacacgcgctccggttgcttctaccggatcagcggcctgggcatcctcggcatcaatttcctcttcccgctgctgtacggcggcagcgcggtgctcctgccgctgcactgctgggccgacagcgaaggcttctgggaatgcgtggaacgcttcggcatcagtttcctctacctggtgccgccggtggtcaaccacatggtcaaggaaggctccccgccgccgcgccgcttgccgttgcagcgcctgctctgcgtcgccggctcggcgcgcctggacgccgacctgcaggcggccttccagcgcgactacgcggcgctggcgaacatctacggcctcagcgagtgcggcttcgccttcctcttcggcaagcgtcgcggcgatgcgttcgacaactcggtgggacctgccgtcggcctggaactcaagctgaccgaccccgacggccgcccgctggagggcagcggcgaacgcgggcgcctgtgggtgcgcacgccgagcctgttctccggctacgtcaaccgccccgacctgaccgcccaggtgctcgaggacggctggctgaacacccaggacctcgcctacttcgacgaggaccgctgcgtgcacgtcctcggccgttgcgacggcaccatcaacaagggcggcaacctgttccacctgaatgaatgcgaaagggcgctcaacggcctggacgaggtgatcgacgtctgctgcctgaaggtcgactgcccgctctatggcgaagactatgtcgccgtgatccacaccgcgccgcaggtcgagttcgccttcctgccctggctccagcagcagctcggcaccctccgcgcgccacagcgcgtggtgctgtcgcaccaggccctgccgctgaacggcgccggcaagcacgaccgccgtgcgctcgccgccctgctgcaacgggaagcctcgtgatgtgcggcatcctcggttacgtcggcaccggtttcagtgtctcgcgcttcgccggagcgctacgcctgctggcccatcgcggcccgttcggcgagggcatcgcggccctgccgaacggcgccatcggcatgacccgcctgccgatgtccggcgccgcggcggtaccgctgccgccgcaggagggccagcggcgggtcgcctacaacggcgaggtctaccaggccggctgcgaaatccatggcgagatccgcctgctgctcgacggcttgcagcgcggggtactgccggacggcatgtacgccctcgccagctgggacccgcagacccggcaattgaccctgctgcgcgacgagttcggcatcaagccgctgtactacagctaccagcccgagcgcggcctgctggccttcgcctccgagccgcgggcgctgctgcacctgctcggcggcgcccgcgccgacgccgaggcgatcgcccaggtggtcgccgccggcgtgccgctggaaggccagaccctgttccagcaggtccgtctgctgctgcccggcgaggtgttgcgcttcgatctctcccaggagcgtccgcgcctctgccagcgccagcggctggccaccgccccggccagcgaggtggacagcctcgacgagcagctcggcgaaaccctcgaacgctgccgccagaccttccgcccctgcgccctgctggtcagcggcggggtcgattccaacctgctcggcagctacctggacccgcagttgcaacgctttcacctgtgcctggaaggcgacgaggaaagcctgctgccacaccctcggctgcaacgcttcgagctgcgccaggaagccttcatgccgctgctgcgtcgcgcggtcggcaacttcggcggggcgacacggatgtccagcctgctgatgtaccagcgcctggccgacggtatcggcgagcagggctatcactgcgtgcttctcggcgaaggcgccgacgaactgttctggggctacccgcgccatctcgaactctggcgccggcgcgacgcaccggaaccgcggcgcttcgccgccgcctggttcggcgagtaccggcgcaaggccgcgctgctggcggaaccggcgggccgacgggtcgccgagcggatcgaggaactcgcccacgaggccctcggccagggcctcgaggcggcgatcggccagttcgacctgcactactcgctggagccgctgctgcgccgcgccgaccatctgctgatgtcgcgcaccatcgaagcgcgcaccccctacctgcatggcgccctggcgcagcgcgccgggcgcctccagcggatcgtcggcgacaccgccaaggcaccgctggtggcgctcctggagcagcgcgagaaacgctggcaggcgcagccgaaacggcatttccgcctgccgttcgaacgttggccgcaggccctcggggaaatgcgccggcacctcgccgaacgcctgccggcgctccacgacctcggcctggaaggcctggatgcaccgagcgtcgcggcgctgcccggcgaccagttgttcaccctcaccaccctgtcgctctggcagcaggaatacggagcctcgctatgacaaccatccatcgtcgccccgcgccctggcggggcaacgcggtgttctgcgcttcggccgctttcgccgccggcctggaaacgctgttcgcgcgcctgctggagcggcgtcccgcggatagcgcggaggctctcctgcgccagcgcctgcatcacgaactggagcatggaagcggcgtgctgctgcacgattccgcgctgctgcgcggactcgccgaggacgaattccagcgggtgttccgcgcattctgccaatggctgggacgcaccgtggcgatcaaccgcaacggcgagtaccttaaggaagtgcgcgacctcggcctgcgcgacgcccgcgacgcgccgcagcgcggccacctgaccagccaggaactggccttccactccgatcgcgccgacctcacggtgctcgcctgctggtcgccggcacgccggggcggcgccttccgcatccgttcctcggccgacgtcctcgccaccctggaagccgccaatccggcctggctgcccctgctcggccagccgatcccccacgacctgcgcgacgaaggcgacgccgactacgcgctggtgccgctgctcacggaaaccccgcggaccttcgtcttgcgctatatccgcaagttcaacgaatcggtgacgcgccacgggctaagcctcgccccgcaggtgcgaagcatgctcgacggcctggacgaggcgatcgaacgcgccgacggctatgccgaactggacttcagcaagggcatgctggtgctggtgaacaaccacaccaccctgcacgcgcgcaccgagttcagcgacgacgagcggcagcgccgctgcctgctgcgctgctggctgagcagcgagttcacccgcgaactgccggaaagcttcctgccgctgttccaccaggtagccgccggcagcctgcgcggcggcatccgtcccctcgcccaggagccccgcccgtgagcgacaacaccttcagcgtgcaacgcttccgcgccctgccgacggaaatccacgtgatgctcgtcggtacgctgctgacccgcggcgcctacttcatggtctggccgttcctggcattgctgctgtggcgcgagttccggctgtccgccagcgccatcggcctgctgctggcgctggcgaccgtctgcggcgcgctcagcggcatctacaccggctggctgtcggaccgtttcgggcgcaagcgcctgatcttcttcggcaccagcctcagcgggctttccttcgtgttgctgggcttcagcggccagccgctgtcctacggactggcgatctccggggtgagcatcggctgcgccctgctcgaatccagttgcaaggcgctgatcggcgaccgcgtcgaggatcgccgctcgcgggaactggcgctctactgccggtacttcctgatcaacctcggcgccgccctcggcccgctgatcggcctgactctcggcgtcgccgcccaggccggcaccttcctggtcaccgcgctggtctacttctgctacggcctgctgctctggcgcctgctgcaccacctcgaacttaagcggcgcagccttgccccgcgatcctcgacggggttcctcgaagcctgcctgagcatggcccggcatcgcgccttcaccctgctgttgctgtgcaacatgctggccgcgctgatctacgccaccttcgattcgaccctcgtgcagtacctcacccgcagcggtctgcccgacgtggtcaacagcatcgccctgctggtgaccatcaacgcgctgaccatagtggtcgcccagtttcccctcctccgcctgctggaaaacaccggcaccggcggccgcctgatgctcggcatgctgctcatgctcctggcccagctaggcttcgcctggaccccggtgaccctgttcgccggcctggcgctggccacggtggtactcagcctcggcgaactgatcgtgttcccgaccttcagcgtggaggtcgaccaactgacccccgacgacttgcgcggcagctatttcggcgcggccaatctctacagcctcggcaccgcgctggcaccgctgtacggcgggatcatgctcgaccatgccggcagccaggcgctgtacctcggcctggccgcgctgtgcggggtgatcatgctgctgcaggtcggcgcggtcggcctgcgccaggccgagcgggccggcggatgagcggcgcgctgctggtctcgggatttttcctgcgccgctccgcctggtccgtggaaggcgccggctggcgaagctgcgaccatctgcgcgacgcgcccggatgcgacctggcgcattggctggaccaggccgccgccacgctggccggcgaggagcgggtgatactctgcggccacagcttcggcggctacctggcgcaatgcctggcggcccgcctgggcgagcgcgccgcgcacctgtacctgttcagcgcgctggtcagcgagggcggcggcgcgctggaaagctaccaggacagcggccaggacaatctcctcgggctatgccgcctcgacccgctcggagggcgggtccgcctggaagaccgcgccggcttcctcgaactgctcggcgccgaggtgccgaccagcgccagcgaacccgcgcaattgctgatcgacccgccgccgcaggttcgtccagcctgcccggtcacctacgtggtggcggccgccgaccggctcagcccgccgccgctgcaacgtaccttcgcccaccgcctggacgcgcgagtgcgggaatacccgggcgggcacctcgccgcactggcggacccgcgcttccttcgcgccctgatcgaatctaataattagatatataaagccgaaaatacgcgcttttttatcgtaatgatctgacggatgatgaccccatcaaccgcccgcaccctcgcgcaaacgagcggcgacgggcccaatggagatccgatcatgatcgaacgtcgtcccttcgaccgtctgggccatgccaaccacggctggctgaacgcgcgtcatcatttttccttcgccgactactatgacccggagcgcgaggactggggccgcctgcgggtctggaacgatgacgagatcgccgccggcagcggcttcccgccgcacccgcaccgcgacatggagatcattacctatgtccgcgaaggcgcgatcacccaccaggacagcctgggcaacaagggccgcaccgaggccggtgacgtgcaggtgatgagcgccggtaccggcatcgtccattcggagtacaacctggaagccgagaccacccggatcttccagatctggatcatcccggaccgccgcggcgaccaaccgcgctggggctccaaaccgttcccgaaggccgagcgcgacggtcgtttcgtcactctcgccagcggcgacgagcaggacagcgaagcgctgcacatccgcgccgacgccgaggtcgccgcggtgaccctgaaggccggccagagcgccgagtacgccctggaaaacggtcgccgcgcctacctggtgccggccaccggcagcatcgaggtcaacggcgtgcgcgccgaggcccgcgatggcctggcggtacgcgacgaaccgaccctgaaggtcaccgccctggaagacagcgaagtgctgctggtggaagtggcctgacccgacagcccctcgcccccacgggcgaggggctgctttcgttgcgccccagcctctctcgacgcagcggcgttatccgccgcaacgcctccggccctgccgactgggttcttcccagcttcacgcttcgcgctcacactacccgcagaagaattcgagaggctccgccatgcgtgaactgcaacccctgctggagaaccacgggctgctcctgctgttcctcaacgtgctctgcgagcaggccgggctgccgatccccgcctacccggcgctgatcgtcgccggcgcgctggccatgcagggcgtcggcgcgccgctgggcgtggtcctgctggtggtggtgctcgcctgcctgctggcggacgtcgcctggtacctggccggacgccgctacggcggcttcctcctgcgcagcatctgcaaggtctcgctgtcccaggacagttgcatccgccagagccagaacatgtacctgcgggtcggtccgagggcgctgctgatgtcgaagttcctgcccggcgccagtgcgttgtccaccaccctggccggcatgacccgcacccacctgcgccgcttcctcgcctacgacgccgccggctcggcactctgggccggttccgcgctgctgctgggggtgatcttcagcgatgcggtagaccacctgctggccctgctcagcgactacgcggccatcggcgcgctgctgatcgccggcgccttcgccgccttcatcgcctggaagctctggcagcgccagcgcctgctgtcgcgcagccggcggattccgcgaatcagcgtggaggaactggaaaaccttcgcgaacaggggcaattgccggtgatcctcgatgtccgcgcccatcacgaagacgagccaagcggcattccgggagccatcccggtggagctgaacgtgtcgctgaaggacctccccggcgacctcagggacgccagcatcgtcatctattgcgcctgtccccacgaactttccgccgcgatgctcgcccagcgcctcaacgcctccggcttcacccgcacctgggcgctggccggcggcctggacgcctggcgcaaggcctacgggcaggtcgtggcgaacgcctgagcgacgcccaccgggttcagcccagggcctgcaccgccgcgccgccggcttgccgctgcggcgccggcgaggagaacaccaggtagccgtcctcgaccttgccgtagcgcagcagcgccaggtcgaggacgtagttctggtaaagcttccagggcatccggtcgccctgcttgggcatgcgctcggcggcgcgctggatgtagccggagtcgaggttgaggaagggctcctcgcgcacgtcgccggtgctgtcgcgggcggtcacctggcgcatgccggtggcatccatgtgattgatcaggcggcagaagtattcgctggagaggtccgccttgagcgtccaactggcgttggtatagccgaccaccgccgccaggttcggcaggtcgcgcagcatgatgccgcgatagcccatgctctggttgaccaggaacggcttgccgtcgaccgccagctcggcgccgccgaacatcaccaggtcgaggccggtggcggtgacgatgatgtccgcctccagcacctcgccggtcttcaggcgaatgccccgctcgacgaagcggtcgatgtgctcggtgaccaccgacgccttgcccttgcgcagcaccttgaacaggtcgccgtccggcaccgcgcagacccgctcgtcccacggcttgtagcgcgggctgaagtgacgcatgtcgaagcgtttgcccagttgcaggctggccagcttgagcagggccttgcggaccaggccggggaaggtcctggcgagcatgaagaagaccatctgcatggccacgttgcgcgcccgcgcctggcggtagatccaggtttccggaaggaagcggcggaggaaattggagatcgcgtccttctgcggcagggtgatcacgtaggatggcgagcgctgcagcatggtgacgtgggcggccttgtcggtcagcgacggcaccagggtcacggcggtcgcgccgctaccgatcaccaccaccttcttgccgctgtagtcgaggtcctcgggccacagctgcggatggacgacctgcccggcgaagtcctcgcgaccgacgaattccggggtatagccggcctcgtagcggtagtagccggtgcacatcagcaggaactgcgcggtcatgcgcagcggctcgggctcgtcgccgcgctgcacgtcgaggttccagcgcgcattggcggaatcccagtcggccctgagcacccggtggcggtagcggatcttccggtcgatgccgttctcccgtgcggtctcctcgatgtagcggcggatcgacggaccgtcggcgatggccttaggatcgctccatggcttgaagttgtagccgaaggtgaacatgtccgagtcggaacggatgccggggtagcggaacaggtcccaggtaccgcccatcgccgcgcgcccttcgagcagggcgaagctcttgccggggcaatgcttcatcaggtggtaggcggcgccgacgccggacaatccggcgccgacgatgagtacgtccaggtgttcgacaggcataaggttcctcgatcggcggaagcgtccagccgtctgctgggctgatgccctccaccctacagaggggatgccgcgcgggtatcccaaccttcgtactgcgatatccgcaaagtatggacccaggcgtgggaatcacccatgccggcgtaccggcatgggtcgggcgctaggaggcgcgggaaggtttctccggggtctccgccgctaccgcgccacggtcttccaactggtcggtctggaacagcgtctccagctcgacccgcgcctcgcgagcgcttttgatcagcgcgtcgcggtcgttgtagaacaggtgctgggaggccaggacctcttcgtcgtgccggcggaaacgacggatccgcgcgtccacctgttcctcgctcagacccaggccgcagagcaccatgcggctcatctccaggctggagaagaaggtctcgcgcaccggctcgaccccggcgtcgagcaacaggtggacgtgctggcggttacgcgcgcgagcgatgatcttcaggtgcggatacagcttgcgcacgcgcttggccgtctcgatgttggtctccgggtcatcggtggcgatgacgaagaactcggccttctctacctgggccgcgcgaaggatctccgggcgcatcgggtcgccgtagaagatcgggatcgcgccgagggtacgggtcagctcgatggtctccaccgaggtgtccagggcgatgaacggcacgcgctgggcgcgcagcacgcgagcgacgatctggcccatgcggccgaccccggcgatcaccacgcgcggggtgtcgtcgttgtcgatgcgttccatttccggcggcggcttcgtcgcctccggctccttcgccagcaggcgcgcgaggccgagtaccagcaacggggtcagggccatcgacagggtgatggaaagcaccagcaggttgtgcaggtcgttctggaacaggccctggtcgcgggccatcttgaacacgacgaaggcgaactcgccgccggccgccaggaccacgcccaggcgcagcgccgaggccttgtcgaggccgccggaaatgcgtccgacgaagtacagcaccggcgccttcagggcgatcagcagcacggtcaggccgagcaccatccacggcgacttgagcagcaggctgatgtccgcgctcatccccacgctgatgaagaacaggccgagcaacaggcccttgaacggctcgatctgcgcctccagttcgtggcggtactccgagtcggccagcagcaggccggcgaggaaggcaccgagggccatggacacgccggccagctccatcagcagcgcggtgcccatcaccaccagcagcgcggtggcggtggacatgtcctgcagcttggtctgggcgacgatgcggaacaccgggcgcagcaggtagcggccaccgaccaccaccgcggcgatgctgccgaccaccttgagggtctgggtcagttcgctgccgccggcgtcgctgtgcgcaccgctgagcagcgggatcatggcgatcagcgggatcgccgcgatgtcctggaacagcaggatggcgaaggccaggcggccatggggctgggtcagttccttgcgctcggcgaggatctgcaggccgaaggcggtggacgacagcgccaggcccaggccgagcaccaccgcgctgttcaccggctggtcgaagccgaccagggccacggtgccgatcaccaggccggtcagcagcacctgcagcaggccgacgccgaacaccgacttgcgcatcacccacaggcgccgcggcgacagctccaggccgatgatgaacagcagcaataccacgcccatctcggagatctgcgcgacgctttccgggttgtccaccaggcccagcacgctgggaccgatcagcacgccggccagcaggtagccgagcaccgcgcccagttgcagacgcttggccagcggcaccatgaacaccgccgcgatcaggaagaccacgccggactggagaaaactgcttccgtgttccacgctcaactcccgctggcggcgctggcgccgaaccggtcgcggatggtggcgatggtctccacatccatggcgatataggcctgcttgacgaaggcgtcgtagggtagttcgtcgcccagcggctgcaggtagcgggtgcagtaggcgaaacgcacgaacagcgagccgggttccggctcctcgatggtcatgtcgaggctgccgccggccacctcggcgctcggcttgatactgtagtgggcactgtccggcgccttcagcacgacttcgtcctcgaccaccagacccggcaggtacaggcgccggtgcaggcggtcgccgtcatcgacgaggatctcgaaacgctccaggccgacgacgaaatactgtggctcgcgcgcacggcagaccaggccttcccagagttgcagccggtcgaggaccggcaggtcgacaagtgtccggtcgttgacctggaccaggtgttcgaattgcatgtggctcacttcctgttcggtgcatgcgataggcgagttctgaccggcgatgggtgcagaaagttttcccgctgccggcgaatcgccaggccgcaggtccacaacgatcgccgacaggcattcgaggacgccgccggggcacccggcggcacatcgacctcactcggcgtcgatcttccagggaatcggcggagcgctcaagcgcggcccttccagggcgtcgagccggccgaagcgggcatccccctcctcccaggccttctgcgcccgggcgatctcgcccttgctgtggccgacgaagttccaccacatgaagatctccgcaccgaacggtgcgccacccagcaacagcacccgcgcgccagggtcgagttgcagttgcaggccgtcgcggccgtcgcccaggtaggccagttcgttcaccgcgaaatgctcgccgcccacttccaacccgccttccagcggcagcaggccgtactcgaagtgcgggtcgagcgtcagttgcagggtcgaggcgtcgtggcaggccaggtcggcaccgagcagcggcgagtagagccggcacggcgcctgtcgcccggccagcgcaccggccagcagggtgaaggtgaccccctgctcctgccagcgcggcaggtcgggatgatggtcgaaggccggggcgatgtcgcgctgctcgtagggcagcgcgatccacaactgcgcggcgtgggcgtggcgctcgtcgggcagcgactcctcggtgtgggcgatgccatgaccggcggtcatcaggttgacctggccggggcggatcacctggacgttgcccaggctgtcgcggtgcaacgcctcgccctggatcatccaggtaaaggtctgcaggccgatgtgcgggtgcgggcccacggccagtccgccgccaggttcgaattcggcgggaccggcatggtcgaggaagcaccaggcaccgatcatccgccgctggcgcgacggcatcagccgactgacggtgatcccgccgccgatttccgcggcacgcgcggtgacccgttgcagcaggtgttcgcggcgctccggacagtcccgcgaggaggacaggtcgcaacgctcttcggtattgctcatgttcaggctctccggtgacgaggcattcaaccgcgcaggcggcgcacccatagctgcagggcctgcaactgctgctggatcagctcgcgcgccttgtcgtcgagcagccggccctgggcgtcgaaggcgttctgcgcgctggagatcatcacttccggcttgttcagcggatgaacgtcgaggaacaccagcgtctggcgcaagtgatactgcgcccgcgcggtgccgaaacgcccggcactggcaccgaggatcgccgccggcttgccggagaacggctgctccggcggccgcgaggcccagtcgatggcattcttcagcaccccggccatcgaatagttgtattccggggtggcgaacagcagcgcgtccgccgcgcggatctgctcgcggaagcgttccaccgcgggcgggaagccgagggcgtagacgtcctcgttgtacagcgggatgccggagatgtccgccagctcgatgctcatgcccggcgggaccaggccaatcgcctcctgcagcgccgcgctgttgtaggagccgctgcgcaggctgccggaaatgcccaataccttgatgtcgtcgctcatgccgtgctcctcgttgtgcgtgcgggttcagtcgcgtagctggctgctgacgctgacctctccggagagtacacgatggatcgggcaggcattggcgatctccagcagacgctggcgctgctcggcgtcgagatcgccggccaggcggatgtcgcggcggatatgggtgaagggctccggcttggtgcgttcctcgacgatgttcagttgcacgtcgataccctccagcggccactccttgcgctgcgcgtacatcgccacggtgatcgccgtgcaggcgcccagcgccgagagcaggatctcgtgcggcgagggaccgctgtcggcgccgccgagggcggccggcacgtcgctcagccactggtggctgtcgtcgccgagggtcacgcgataaggggtggtgccgagggaagcgttgacgacctgggtagccatggggtttctcctgtgcatggggggcgtgccggaacctcgggttccggcgaagcggcgttccgatgaaaacatctggacggaaaacgacacaaggcacccgatggtcggagtgccttgtgtccgggacagcggcgaagccggcttacttcttcgtgccgaagctctggatcaggttggcgtacgccggcaggtggccgccgaggatggcaccgaagccttcgatgtcgttgcgccagtcgcggtgcagttcgcagccgacgctgaaccagttcatcagttgcgcgccggcggcggtcatgcgcgcccaggcggcgtcgcgcaccaccgggttgaaggtgccggaggcgtcggtgacgacgaatacgtcaaacccctcctccagtgccgagagggtcgggaaggctacgcagacatcggtcaccacgccggcgatgatcagttgcttcttgccggtggccttgactgccttgacgaagtcctcgttgtcccaggcgttgatgttgccggggcgggcgatgtacggggcctgcggaaacatttccttgagttccggcaccagcgggccgttggggccatcctcgaagctggtggtgaggatggtcggcaggttgaagaacctggcgatgtcggccaatgccaggacgttgttcttgaactcgtccgggctgaaatcgcggaccagggagagcaggcctgcctggtggtcgacgaacagcaccgccgcatcgttcttgtcgagtcgcttgtaggtgaaggacatggtgtttctccggtctcgggcggcgtccgtcgccgcgcggtgtgaaacgaagcgcctcctgggaggcaagcatgggcggtctcgggagcgcacgccgcccatcaagagtagtgacagcgacagcgatttaccgcccggtaaaatgcgaaaacggtgttctcgatacgagaacaattccattccccgggcgcgctacgcttgccctgccattgtctttcccgtacgtgcgacgcgcgcatccccttaccaggagttctcccgcatgcgacagtctgcctcccgattgtttcgagattcgccatgagcctgcgccttgaagacatacaggccttcctcaacgtggtcgagctgggcagcatcagcgccgccgccgaacgcatgagcctgtccaagtccgtgatcagcaaacgcgtcagcgacctggagcgccacctcggcgtgcgcctgctctaccgctcgacgcgcaacgtcgagccgaccgaggccggcggcttcttctacaagtcggccaaggcctcgctgcaggacctgaacaacgccgcggaaagcgtggccctgcgcgagaacgacctgtgcggggaattgcgggtgatggcgccgatgagcttcggcacgctctggctggggccgctggtgatggaattcatggcgcgcaacccgcgcctggaagtggtcctgcaactggacgaccggatcgtcgacttcgagaaggaaggctacgacctggcgatccgcatcacccgcctgcaggacagctcgctgatcgcccgccaactgggcaccagccgccgggtagtgtgttgcagcccggaatacctggaacggcacggcccgctgcaacgtatcgaagacatcctctgccatccctgcatcggctacagccacaacaccccgtcgcagctatggagcttcgagccgcgggtggccggcgagccggcgcggatgatcaccccgcgcggacgcttcaacaccaacaacggccagaccatgcgcgacgccgcggtgcgtggcctgggcctggcgatgctgccgctgttcatcgccgccgaggacctggccgccggccggctggtcgaggccctgccgcaggagcggccgctggacgacctgatctacgccatgtattcgcgagcggcaaccctctcgccgaaagtgaagctgttcgtccagtttctccagcaggccctgggcagcccgccgtggggcgtgcgctgagcctcgctcagcgcttgcgacagacgctcagcccgtcgccgatcggcagcagcgagtagtccacccgcgcgtcgttcttcagcgccaggttgagctgctggatgccgcgggtatccgcactcttcggctgcgcttcgagcacccggccgctccacagcacgttgtcgaaaagcaccagcccaccctggcgcaccagcgccagcgcggcctccaggtattcggggtagttggccttgtcggcgtcgatgaaggccaggtcgaactgcccggccaggccttcgtcgagcaacgcacgcagggtttccagggcgggcccgaggcgtagctcgatgcgctcctcgacagcggcttcgcgccagtagcggcgcgcagtcaggtggtagtcgccgggcaggtcgcaacaggtaagacgcccctgctcgccaagggcggtagccatgcacagggcgctgtagccggtgaaggtgccgacctccagcgcccgccgcgcgccgatcagggtcagcagcaaggcgatgaactggccctgctcgggggcgatctgccagcgtgcgttgggcagcttcgcggtttcctcgcgcaggcgggtcatcagcggggtttcccgcagcgaaacgtccagcaggtagcggtagaggttgtcgtcgaggttgagggtgcgggtggtcatcggcccggacctccccgcctcagggcacccgcgccaacggcgacggcgcgaccagcacgcgcttggcgtccaggtacgcgcgttgccagtagctgttctgcaggctgtccaggcgcaccgtgccgccggtgcgcggcgcatgcacgaagcgaccctcgccgacgtagatgccggcatggctcacggtgcgaccaccggaggtggcgaagaacaccaggtcgccggtctgcagggcctgcaccggcacgctgggcgcgcgcatggaaatcatctcgcgggtcgagcgcggcagcttgatgccggtcatgtcgcggtagacgaagttgatcaggccgctgcaatcgaagcccgaatcgggcgtgttgccgccccagcggtagggcgtgccgaccaggccgagggcacggaacagcacatcgtcggcggcgggcgagaaattcgtcgccggacggaatacgacctgtttggcgggcgcggggggcggcgctttgctggcgcaggcggtaagcagcgcagcaaaggcgaggatcgagaatcgggccagtgcatgcatagtggaagccttcctggtgaggaatgcttccactttgctacgacaaggagttaaacgcaatacttaaagtaaaactttaagtttagcgcttgctcgtcagggcatccttgtagccgggttcgagcacccgcttggcttccatgtagctcaggctccagtagctggagtccaggctgtccacccgcaccccgccgccgcgacggctggcggaatggatgaactggccatcgccgatgtagatgccggcgtggctgacgcggccacggccacggttgttgaagaacagcaggtcgccgggctgcagctcgtccttggagaccagcggtacgtccatatcgatgagttcgcgggtggagcgcggcagcttgatgccggcctcctcgcggaacaggtagccgacgaagccgctgcaatcgaagcctttcgccgtcgtaccgccgaaacggtacggcgtaccgatcagttcgaaagcgcgctcgaggatgctggacgccagcgcaggcgtaccagccgatgaattgtccgccccttcgtcctcaacatcctgccaagcgatcgcgtcgcgttcgacgtcgatgctgctcttggctgcggtcggctctttggcgacctgcggctccggcgaatggctggcgcaagcggccagcagcagaacgaaactcatgggcacgaggggtgctaagcgtttaagcatgggcacgaccgtgtctcattagttttactagcgggctaatttgccttctcgatcaatcctatgcaagttttttatcgataaatgtgacttaccacctgcggcatgatgtctaaggctcgtcctgtcattttcacatcgacccgctcgctgaggtcggtcacgccaggattcacctccgcggtgaagcctcccgcctgccgcgtgcgcagcaccggttcgacgatataggggaagctcgcggtggttcccaccaccagcaccgcatcgaagcctttgcgcaattcgcggtacagggtatcgatcgcctcttccggcaacatttcctcgaacagcaccaccggcggccgcagcaccccaccgcaagcggcgcagcgcggcggcaactggccgtgcagatgctcctccaggccgccgctctcggcaccgcaggactggcagtagagcggcgccagttcgccatggatctcgatcagccgctcggccggcgagccggcctggcgatggaagccgtcgatgttctgggtcagcacccagcattccggcttgtgcttctgcaactcggcgatggcttcgtggccggcgttgggtcgggccgccaggcaagccttgccaagttccgcgaggtacttccagcacagcgccggatcgcgccgcagcatcggtccggaaagtgccgcctcgatcggcaggccctcttccgtgcgaccgttgtagagaccgccgaggccgcgataggtgggcataccggagtccgcggagaggccggcgccggtgatgaccaggatgcgttcggcgcgccgcagggcctgggcgacggtagcgatcgggctgtggctgtccatggttggctcctgtcaggctggcggatcgagggaagccggcaagccgagccggcgcatgcgcccgagcagggtcgtgcgcggaatccgcaaccgggcggcggcccgggagagattgccgcgcgcctggcgcaaggcgtcttctatcaggttgcgctcctgttgcgccagcgcctcgcgcaggcctccgaccgccgcgctgttcatcgagagcgcggcctcgccgcccacggcctcggcgccgtcgtcggcgaacgccacctcatccagcagtgcgccgccctccccgtgcagcaacaggctgcgccggatcacgttttccagttgccggacgttgcccggccagtcgcaggccagcaactgcgccagcgcccgctcgccaagagcggtgacacgcgggttgaggctgcgcgcatcgcgacggacgaacgcccgtgccagcagttccacatcgccggggcgctcgcgcagcggcgggatgcacaggctgcccacgtccagacggtagtacaggtcctcgcgcaggcgtccctcggcgatcgcctggcgcggcggctggttgctcgccgcgatcaggcgcacatcggcccgctgcgggctcaggctgcccagaggcaggtagctgccgtcctgcaggacccgcagcagcttgctctgcatggccatcggcatggaattgatctcgtcgaggaacaagctgccgccctgcgccagggcgaacatgcccttgcggttctcggcgccggtgaaagcgccgcgggtggtgccgaacagggtactttccagcagcgtctcgggaatcgctgcgcagttcaggctgatcatcggaccgctgcgtcgcgggctcagggcatgggcgcgacgggcgaacagttccttgccggtgccggtctcgccatggatcagcagcggcaggtcggtggccgcgaaaacgtccaggcgctgcaactgccgcagcaggctcggcgccacgctcaggatgttcgggcaatccgccaggcctgcggcctcttcggtctcggcgacgacttcgccgagctccatcgcgccgagcaggcaaccgtcgcgcccgcgcagcgggatcgcccggtggcgatactgcaacagctcgccgccggcccccacgtaggcctgcagcgtatcgatcgacggccgcccttcggccaggcaacgcaacagcgtgctttgctcggccgccagccagggagcgctctgcaacaggtgcatacccaacgcccgctgcgggtcgagaccatcgagcaggccgctggcacggttgtagtagacgaagcgaccggaggggtcgaccaccgtgaccggttgccgcaggccgtcgaaaatcggcgccaggcagtccaccaaccaggccagttcaccgcttcgcgtggaaatcgtcggctcctcgacaagcgccatgctctccccctcggtttcccggatgtcgaaatctcgtcagttgacccatcttcgacgcagcgcgaccgagcatccttggcgtggatcaaccaagccctcggaaaaccaggaaaatcctccgatttatcaaggatttccaaggcaattcccgggcgttggctggcgcgtggcttgcaacgacctcgtcgtccccacacgaggaaaatcgtcatgttcaagcacatcatcgctcgcacgcccgcccgcagcctggtcgacggcctgacctccagccacctcggcaagccggactacgccaaggccctggagcagcacaacgcctacatccgcgccttgcagacctgcgacgtggacatcaccctgctgccgccggacgaacgcttccccgactcggtgttcgtcgaggacccggtgctctgcacctcgcgctgcgccatcatcacccgccccggcgccgaatcgcggcgcggcgagaccgagatcatcgaggaaaccgtgcagcgcttctatccgggcaaggtcgagcgcatcgaggcacccggcacggtggaagccggcgacatcatgatggtcggcgaccacttctacatcggcgaatcggcccgcaccaacgccgagggcgcccggcagatgatcgcgatcctggagaaacatggcctcagcggctcggtggtgcgcctggaaaaggtcctgcacctgaagaccgggctcgcctacctggaacacaacaacctgctggccgccggcgagttcgtcagcaagccggagttccaggacttcaacatcatcgagatccccgaagaggagtcctacgccgccaactgcatctgggtcaacgaaagggtgatcatgcccgccggctatccccggacccgcgagaagatcgcccgcctcggctaccgggtgatcgaggtggacacctccgaatatcgcaagatcgacggcggcgtcagttgcatgtcgctgcgcttctgaaccatgccgcggcggaccgacccgccgcctcccgccgtcgcaccccggcgcaggctccgcctgcgccgggcgcgacataccggatgcagtttcggaggtgccacatggccgattcggacaagggaaaactggggctgccggcgctgaccgcgctggtggtgggcggcatcatcggcagcggcatcttcagcctgccgcagaacatggccgaaggcgcaggcgccggcgcgatcctgatcgcctgggcgatcaccttcgtcggcatgctgaccctgacgcggatattccagtggctgtcgaccacccgccccgaactggacgacggcgtctacggctacgcccgcgaaggcttcggcgaatacctggggttcaatgccgcctggggctactggatttccgcctgggtcggcaacgccggctacctggtggtgctgttcagcgccctcggctcgttcggcgcgctggccttcttcggcgacggaaccacctggccggcgctgctcggcgaattgacggtgctctggctgatgcatgccttcgtcctccacggcgtgcacaacgcggcgatcaccaacgccatcgtgaccctcgccaaggtggtgccgatcgccctgttcatcctctgcgtagccctggccttccgcatcgagacctttcacctggacttctggggcagcccggccctgggcagtgtcacccgccaggtggaaaccaccatgctctacaccgtctgggtattcctcggcatcgagagcgccacggtctatgccagccacgcgcggcacgcggccgatgtcagccgcgcaaccctgctcggcttcgtggtcaccctgctgttgctggtctgcgtctcggtgctgtcgctgggcgtggtgccgcagcacgaactggcgcagatgaagaacccctcgatggcccaggtgatggccgcggcggtgggcccctggggcgccacgctgatcaacgtcgggttgatcgtctcggtcggcggcgcgctgctggcctggaccatgctcgcggtggaaatgctctacctggccagccgtggcccaacgcacaccgcgccggcactgttcggccgcaccaatgcggtggaaaccccggcgccggcactgtggctaaccagcacgctgatctctgcgctgctgctggtggccttcctcaacgcctcgggctacaacgcgctgatccagttggccacctcgatggcgctgatcccctacctgctctgcgccggcttctgcctgaagctggtggcgcgccgcccgcactcgggcgcgatgctggcgctggcgctgttggggacgctctacggggtctggctgatctacgccgccgggctgaaatacctgctgctgtcgatgatcctctacgcgccaggcctgggcttcttcctgcatgcccgtcgccagcgcggcctgccggcgttcggcaatcgcgccgaaggcagcgtcgcggcgctggtactggtcctcgcgctggcggcgctgtggatgatcggcagcggtcggctgaccctctaactcaatgattgaccgtatgtgccagcatcaccgacagctggcacagcggccggccgctctcctcgcgccactggttgaaggctccctggacggccgccaggtccttgaggctggtgggcggtttgtcgatgatctcctgggccttcagcgcggcgaccatgtcgtcgctgggaatgaaggtgtccttgccggccatccgcaggaaacgcggcgccgacaagccgccgagctggttgccgcgcttgctcagcagcttccacaggccgacgatgtcggtttccggccaatccgcgaggaagttgccgaagctgccatgttcgcgggccaggtcgagcaccatctgcgcattgcgcggcacgctcttgagcttgcccaggtggcggatcaggcgggcgtcctgcatcagccgctcgagatgctcggcgctcatgagcacgaccttctgcggatcgaagccgaagaacacttcctcgaaggccggccacttggcgtccaccaggctgtgcttgaggccggcgcggaagatccgcaggctgatcagcgacaggtagcggtcgtcacccaccgcgcgcagctcggcggcgctcttcggctgcggcaggcgcgcttccagcgcctccctggagccgaagcggttcaggcagtattcgtacatccaggcgtagtcgcgcatcgggaatccttgcagaccggagagaagaactgactcgcggcgcggctcagaggttcatcacgtcgaggaagcgcggcgtggcgttctcgtcgatgcgcaggttggcgaagtcgaacaggttgcggtcggccagttgcgacggcaccacgttctgcagggcgcggaacatgatctcggtacgccccggcgatttgcgttcccattccagcagcatttccttgaccacctggcgctgcaggttctcctgcgaaccgcagaggttgcaggggatgatcgggaactccttgagctgggaataggcctcgatgtccttctcgctgcaataggccagcggccggatcaccacgttgcgcccgtcgtcggccagcagcttcggcggcatggccttcagggtgccgccgtagaacatgttgaggaagaaggtctcgaggatgtcgtcgcgatggtgaccgagggccatcttggtcgcgccgatctcgtcggcgaaggtgtacagcgtgccacggcgcaggcgcgagcacagcgagcaggtggtcttgccttccgggatcttctccttgaccaccgagtaggtgtccttctcgacgatgtggtactccacgccgatcgacttcaggtactccggcaggacatgctcgggaaaaccgggctgcttctggtccatgttcaccgcgacgatctcgaagcggatcggcgcgaccttctgcaggtagagcaggatgtcgagcatggtgtagctgtccttgccgccggacaggcagaccatgaccttgtcgccatcctcgatcatgttgaagtcggtgatggcctcgccggccaggcggcgcaggcgcttctgcagtttgttctgattgaccgaaagggtgcccatggtgctctggaatccgggtgttcgaggagaaaagctggctattttacgcacaaagcgacgccgaccccagcccctcccgacgcccgatgttagtcttgccccatgactcccgacctcgaccaccgcctcgacctcgccgggcagatcctctgcctgttgcgcgagcatcccgaggggctttccgaataccagttgatccagctgctaaaggcccgccattcgacgcatatcccccatcgcgaactggccgacaagctggtgctgttccgcacccatttcctcctgttcaacgcgctctaccacctgcgcgaccacctctgggccgagcgcgaggcgcacctggagatcagcccgctgaacctgtgcctgcgcccttacgtggccggcacgcaggcactgggacagggcgatccgctgcgcgactactacctcgacctgcgtcacctgggggagaccagcgaggccgacgtcgagcggctgctgcagagtttctggacgcgcatgcagggcagcgaggagaaggccgccgccctcgccctgttcgagctggaaggcgcggtcgactatcccgccatcaagctgcgctaccggcaactggtcagccagcaccatcccgaccgcggcggcagcaccgcgcgcctgcaatcgatcaacaaggcgatggaaatactgcaacgctattacagccggccgtgaagcttcgatttgctctaaacccgcgagcgacgcgggctcgggccgttcctatactgcgacataaggtcgcataggtcggccgagcaccgggtggcgctgtccatgcgcgcccggcgcttcgctggggggcgaccacataagaacgaggaggaaacggcatgatccatcatgtatgggggctcttcacccatcccgatcaggaatggcaggaaatccgtggcgaagaagaaagcatcagccacatgtacctgacccacatcctgatcctggctgccattccggcgatttccgcctatatcggcacgacccaggtcggctgggtggtcggcggcggcgatccggtcaagttgacccaggccagcgcgttgcagatgacggtcctcacctacctggcgatgctcgccggggtggcggtgatgggcgcgttcatccactggatggcgcggacctacgacgccaacccgagcctgacccagtgcatcgtgttcgccgcctacaacgccacgccgctgttcatcgccgggctggcggcgctgtatccgcacctctggctgggaatgatcgtcggggtggcggcgatcagctacacggtctacctgctctacgtggggattcccaccttcatgaacatccacaaggacgaaggcttcctgttctccagctcggtgctggcggtgggcctggtggtgctggtggcgatgatcgccctgtcggtgatcctctggggcagcggggtcggcccggaatacaccagctgacgtccagcgaacgcatcgtacgaccgggccgcgggcaaccgccgcccggttttttcttgcccgccgccgcgcttgcctgatcctgcaccccggacgagcggtcgtcccgacgcctgcgcccgccctcctgtctccggcataatcgcccgctgctggagtcttcccgaatgcccgaacacctcaacgcccgcgtcgaggcctgctatcggcaggccgaacacttcttccaacgcagcttcccccgcccgaccgtcagcttccgcctgcgcggccagaaagccggggtcgcccatctcgacgagaacctgctgcgcttcaatccccagctgtaccgcgagaaccgcgagcacttcctggaacagaccgtggcccacgaagtcgcgcacctgatcgcgcaccagttgttcggcccgcgcatccgcccccacggcgaggagtggcagttgatcatgcgcggcatctacggcctgccgccggaccgctgccacacctacgcggtcaagcgccgcgccaccacccgctacctgtaccgctgccattgcccggagcacaacgacttcccgttctccccgcaacgccacaccctggtggccaaggggcgccgctactactgccggcgctgcaaggcgaccctggtgttcaccggcgaagtgctccgcgagtgattcaggcgatggccccggccgccttcagctcggcgatccgttcggcggagtagcccaggccttcgagcaccgccacggtgtcggcgccgagcgccgcgccgatgtggcgaggcgccggcaggccggcggaaaacttgatcggacaggccatctgcgcctggctgccgccgtccgccagcggcacccgggcgaccagcccgcgcgcctgcaactgcgggtgttccagcgcctcggagagcggcagcagcggctccacgcaggcatccagggcggcgaacaccgcctgccattcggcgaagtcgcgtttctcgaactccatctcgatctcgcgcttcagcgcccgctgctcttccggcttcggcgacaggccgcgggcggccagttccgggcggccgatggcggcgcagaactgctgcatgaactgcggttccaggctgcccaccgaaaaccagcggccatcgcgggtgcggtagtagtcgtagaagctgccgccgttcagcgccagcgcctccatctccggctcgaccccggccgcgagatagcctgcaccggccatgccgttcaggctgaaggcgcagtcggtcatgctgatgtcgacgaactgcccctcgccggtctgctgccggtggatgaccgccgccagcaggcccatcacgccatgcaacgaaccgccggcgaggtccgccagttgcacccccagcggcaacgggccacgctcgcggcgcccggtgtagctggcgacgccggccagcgccaggtagttgatgtcatgcccggcgcgctcgcggtacggcccggtctggccgtagccggtgatggccacgtagatcagccgcgggttcgccgccttcagcgcctcgtagccgacgccgagcttgtccatcacccccggacggaactgttcgaggacgatgtcgtattcgcgtaccagctccagcaccacctcgcgcgcgccctgccgcttcaggtcgaggccgatggaacgcttgttgcggttcaggtaggcatggctggccgaggtgccgtcgacgtgcggcggcagcacccgcaccaggtccatgcgcccgggcgactccacgcgcagcacgtccgcccccatgtcggccagcagcagcgaggcgaacggccccggcaacagggtcgagaaatccagcactttcaacgatgacaacgggcctttcatgctccctcctctgggtcgccgggcattggtcgggatcgcctgccgagcagcctatccacccgccgcgcggcgcgacatggccgtggcgtcagagcttcatgccgcggctgatgatctctttcatgatctccgaggtaccggcgaagatccgctggatgcgggcgttggcgtacatcctgcagatcggatactcccacatgtagccccagccgccatgcagttgcacgccttcgtcgaccaccttgcccagcagctcggtggtgaacagcttggcttcggcggcgacctcgggggacagcttcttctggttgtggtccatcacgcagcggtcggtgaagacctgcgccacgtcgatctgggtacgcatttcggcgagcttgaagcgggtgttctggaagtgcgccaccggccggccgaaggcctggcgctccttcacgtagtcgatggtcgcctgcaacgccgcctcggccccggccaccgcgccgcaggcgttggtcaggcgctcctgggcgagcatgttcatcaggtagaagaagccgcccttggcgtcgcccagcaggttttccttcggcacccgcacattgttgaagaacagctcggcggtgtcctggctcttcatgccgagcttcttcaggttgcgcccgcgctcgaagccttgcatgccgcgctccaccaggaacaggcccatggcgtgcttgttcgccggatcggtcttcgccgcgacgatcaccaggtcggccaggaggccgttggagatgaacaccttggagccgttgagcagccagtggtcacccttgtccaccgcggtgctgcgcatgccggccaggtcggagccggcggacggctcggtcatggccacggcgaggatggtctcgccacggacgatccccggcaacaggcgggccttctgctcggcgctaccgtattcggcgatgtacggcccgcacaacgccgagtgcagcgggatcatgaagcccggttcgttgatccgcgccagctcctcgcacatgatctgctcgtagcggaagtccttgagcccggcgccaccgtactcctcgtccgcccagggcagcaggaagcccatctcccccgccttcctccagacagcgcggtcgaccaccccggcctcttcccaggcatcctggtgcggtaccacctctttgtcgagaaaggcgcggaaggcatcgcggaacaggttgtgttcggtctcgaagatctgccgttgcatgtacggggactccctgcggtcagtggttccgcagggtaggcggcgccggccggcgccctcaatgacgcgagcgctcaggctcggttgaccgaatcggtcagctaccagtccatgctcgccggctgcacgcccgggtgggacgggaacaacggcagcacctcctcggccagttcctggatgacttccgctgccggcctggcggcgaactggatgcccagggcggcatggttgacgcccgccgcgcgccattcgccgagcagctcgatcaggccgttgcgcccggtgcgcaggacgtagccgccgtgcaacggcgtacgcggatacgccgggtcgtccaccaggtccagccattcgttggtcatgtgcgggcggaacccgccgtccgcgatggacatcctccaggcgcggatcttccgggccaggcgacgtggtccggacgcatcgacagtcgactccggataggtcagccagccatccgcctggcgtgccagccagtccgccggctgccgcgcggagccggtgacgaccagcgggatggcgccggccggcggacgcggcaacagttcggcgtcgtccagcgtaccgagcggcgaggcgacgtgccggcagccgtgcagcagttggcgcaggtagtccaggccctgggcgaaccgctcgccgcgctgcgcatgctccaacccgtaggcggggaactccaccggccggtcgccggaggcgaggcccagcaccaggcgtccgccggacaaccggtcgacgctcgccgcggccttggccaggtcgaccggttggcgcagggcaagcaccgcgctgccggtggccagggcgatacggcgggtccgcgcggccagatagccaaggtaggtgaacgggtcgaacacttgtccggcatcgccgaagcgtgggtcgaacagcggtacgtcgcgtacccagacggcggcgaatcccagtcgatcgatttcttcgaccaaccgcgcctggcccagcagcacccgcatgtcgccctggtagaaacgcaacggcaggaacaggcccagggtcagcgcgtctgcggcgaacatgcgccgatagccagggtgcccgacgaaggccggcgccgaggcgccttgcagcagggcgctcatggacccaccgccggttccggcaggaggatcccgcgctgcaccgcaggccgcagggccatgcgccggtgccagtcgtccaggtggcgataatggctgaagtcgaagtcgacgatccgcgccgtatgggtccagccgaaggtggcgatatcggcgatggagtattgctcaccggccagccagggccgtccggccaggcgctggtcgagggtggcgaaaacctcctcggagagccgccgatagcgttcgatggccggcgggtaccgctcttcggcgaagatctcgaaatgcacgcgctggccgaggatgggccccatgctggaagcatggaaagtcagccaggtcagggcctcccagcgttcccggggggcgtcgggaagcaaccgcccgctggtctccgccaggtactgcaggatcgccgccgactcgaacagggtgatgccggcggcccggtctaccagcaccggtatccggccatgtggattcaggcgcaggaattccgggcggcgttgctcgccatggtcgatgcgaacgtggtgcagtgcgtagggcagccccagttcctcgagggcgatggtgatcttgaatccgttgggtgaactgtcgctgtagagctggagggaaggcatggcaagtatccttgcagcgctggactatccggcgcctgggcgatgggggcggcgccgaccggggaaaccgcctcggccgcttcccgcacaccgaagaaagcagctaggctaaagtctctcgtttcgccacacatgctgaagcccaggccggcggatgaaaaacgatcctttctacaacctgtttatagaaaaactgaattcatgggtgccgtcctcccgctcctcgcgctacgcgctttcgtcgaaaccgcccgccatggcaatctcacccgcgcggccgcggccatgggcgtcactcccggcgcggtaagccagcagctcagggctctgcaggcgcgcaccggcgtcgtcctgttccagcgcttcagccatggcatgcgcctgacgccggagggcgagcaggtctatcccggactccgccaggccttcgagcagatcaccgcgagccttgcccagctggaggcgatcaatgcccgccagaccctcacggtcagcaccgagccctccttcgccgccacctggctggtgccgcgcctcggtcaattcagcgcgtcgcacccgcaggtggaagtccgcgtggaggctacggcactgctcgccgacctgcgccgggaacgaatcgacgtcgccatccgccacgggctcggcgactaccccggactcgacgtgcaggcactgatggccccgccgctgatcccggtggccagcccgcgcctgctggcggaaggtcctgagatccgcgaagcgatcgattgcctggcctacccgctgttgcaggagtcggagcgcaatgactggcgcctgtggctgcgggcgatgggggtggaggacgacccgcgcagcgagagaggtccggctttcgccgacgacctgctgctggttcgcgccgccgaggccggccagggtatcgcgctggtacgggagatccatgcccgcgccgagatcgtcagcggccgcttggcggtcgcccttgagcggccctggccgagccgcttcgcctattacgcggtgagcctgccaggagcggcgcaacgagcgcccctctcgctgttcctcgcctggctgcgcgagcaggccgccgccgaggcataaaaaaacccgccacgagggcgggttcgaagggcggcagggagctcttcacttccccctgccgaacaggtttgagcttagaccgcttcgcggccgcccaccggaatatcgctggcaggcgacgaagcgttgccctcgccggccagttcgcgctgcaaggtgccctcgtcgagctgcttgcaccacttggaaaccactaccgtggccacgccgttgccgaccaggttggtcagcgcgcgggcttcggacatgaagcggtcgatgccgaggatcagcgccaggccggcgaccggcaggtggccgacggcggaaagggtcgcggcgagcacgatgaagccgctgccggtgacgccggcggcgcccttggaagcgatcagcagcaccagcagcagggtgatctggtgggtgatgtccatcggcgtatcggtggcctgggcgatgaacaccgcggccatggtcaggtagatcgaggtgccgtcgaggttgaaggagtaaccggtgggaatcaccaggccgaccaccgacttgttgcagccgagcttctccatcttgtcgatcatccgcggcagggccgactcggaagacgaggtgcccagcacgatcagcagttcctcgcggatgtacctgatgaagcgcaggatgctgaagccgtgggcgcgggcgatgccgccgaggacgatgagcacgaacaggatgcaggtgatgtagaagcacagcatcagctggccgagctgcaccagcgaacccacgccgtaggcgccgatggtgaaggccatggcgccgaacgcgccgatcggggcgaccttcatgatcacgttgatgatgttgaacatcacgtgggagacgcgctcgatgaactcgaacaccggcttgccgtagctgcccaggcgatgcagggcgtagccgaagagcacggagaagaacaggacctggaggatgtcgccgttggcgaacgcgccgaccacggtgccggggatcacgttcatcaggaagtcgacggtgctctgcttctcgccggcagcggcgtaggcagcgatcttgctggtgtcgagggtgttcgggtcgacgtgcatgccggcgcccggctggactacgttgaccactaccaggccgatgatcagggccacggtggagacgacctcgaagtacagcagcgccatgccgccggtcttgccgaccgacttcatgctctgcatgccggcgatgccggtgaccacggtgcagaagatgatcggcgcgatggccatcttgatcagcttgacgaagccgtcgccgaacggcttcatcgccaccgccgtttccgggtaccagtggccgagcgcgataccgatggcgatggcgaccagaacctgcacgtacaggctcttgtagaagggttgtttggtcatgggcagagtcctcacgggggcgcttcgccagttccctggaacgcgctcaccggtagcgttaccccccttgctggggagattttttgtcgtgaaccgccgcggcggaaccttgcccaggcattgcagaggctgtgccaggatgctctttatctaaataaaatccttatatatcaacaagttaaataataaatgaaaattgcatagcgggctaagcgtggcggattaccgcccggcgggccggctgtgccgcgcgagcatggcgggagtccgccaccacccttgtcgtcttccgggtggcgccctaccatcgccgttccaacaacaaggacgccgccatgcgtgagcgcaccatcgccagccatttcgtccgcgccgcgttgcgcggggccacgcgccaaggcctggacggccccgccctgctgcgtcgcgccggcatccagccggccctgctggacgaaccgcgggcacgcatcgcgccggagcagttcacccgcctgatgcagttgctctgggaagtgctggacgacgaatacatgggcttcggcgaagtccgcagcaagcgcggcaccttcgccatgatgtgccacaccctgattcattgccggaccctggaaaaggccctgcagcgcggcgaactgttctacggcctgttcccccaggcgccgctgatccacctgcggcgcgacggcgacctggtgcgcctgagcctcgaggaacgccacctgtcggacccggatcacttcctcgccgaaagcctgctggtgatctggcaccgcctcgccagttggctgatcggccagcgcatccgcctggaggaagccaccttcagctacccggcgccggaccaccaggccgagtacgacctgctgtttccctgcccccggcggttttccgccggctgcaccagcctgctgttcgccgcccgctacctgggcatgccgctgctgcaggacgaacgcaccctcaagcagttcctccagcactctcccgccgacctgctggcgcgcccggacggcggcgacagcctgaccagccagatccgccgcctgctcggccgcgactgccggcgctggccggacctcgaccaggtcgcccgccaactgcacatgagttcgcagaccctgcgacgccacctgcgcgaggaaggcggcagcttccagcaactcaaggaccacctgcgccgcgacctggcgatctaccacctgggtcgggacgagctgtcgatccaggacatcgccgagcagctcggcttttccgagccctcggccttccatcgcgcgttcaagaagtggaccggcctcacccccggcgcgtaccggcaccaggcggaagcctgaagctcagcccagctcctggcgacgaagcccgctgcgcagttggtcgagcaccgtggcgaacggctgcggccgcccgaccgcgtagccctgggcgaaatccaccccgaggcgcgccaggtgatcgaggatttcccggctctcgacgaactcggccacggtcaccgcgcccaggcggtgggcgatctggttgatggagtcgacgatggcctggtccactgggctcttgtccaggttgcggacgaagctgccgtcgatcttgatcacgtcgacgacgaaattcttcaggtaattgaaggaactcaggccggagccgaagtcgtccagcgccaccttgcagccgaggtcgcgcagcttggcgacgatccgcgaagccaccgacaactggttcatcaacgccgtctcggtcagctcgaagtacaggcgctccggcctcagcggcgagtgttcgatgcgatccagcaggtaaggcaggaacagcgggtcgttgagcgagttgccggacaggttgatgccgatgctcaggccctccaccgcggcgatccgcgcgccgaagttgatcagcgcctcgttgatcacccagcggtcgatgctggccatcaggttgaagcgctcggcggccgggatgaaggcgcccggcggagtcatctggccatccggatcgtacagtcgcagcagcagctcgtagtgccggtcgccgtcgcggcgggggccgaccgggactatctcctgcgcctgcaactggaagcggtcgttctccagggcctcgcgcagcccgctggcgaggagtatgtcgcggtgctggcgctccacttcctcatggccgaactggtacaccgaaacccggttgcgcccggcatgcttggccgcgtagcaggccacgtcggcctggctcatcagttcgctggtgctgcgcgaggtggcggtaagggcggtgataccgatgctcgcgcccacgtcgtagagccgcccttcccaggggaagcgcaccgagcagatctgctcgatgagcttgctcgccacctgctccgcctccgccaggtcgcaatcgaacagcagcaggccgaactcatcgccgcccagccgcgccagggtgtcggaggcgcgggtgcggtcggcgagaatccggctcagctcgcgcagcagcatgtcgcccgccgcgtgcccggcggaatcgttgaccaccttgaagcggtcgaggtcgatgaagcacagcgcatgctgggtcgcccgctcctgggcgttggccagggcgcgttgcagctcctcctcgaacttggtgcggttgaacagcccggtgagggcatcgtgggaggcgtgatagctcagctcacgctgcatcgcccgggccttggtgacgttctggaacaccagcacggtgccgatgatctcgccatcgcgggtgcgcaccggcgccgcgcaattctggatatcgtgctgctcgcccttgcggctgatcagcgtggcgccgtcctccaggtagaacacccgggtgttctgcaggcagcgtcgcaccgggctttccagggcctcgccggtgtcgctgtcgagcacgttgaagaccagttcgtggggcgcgccgatggcgtcctgcaaggtccagccggtcatcgcctcggccaccgggttcatgaaggtcacgcggccgccggcgtcggtggtcaacacggcatcgccgatggaatacagggtcacctgcaggcgttccttttcctcgtgcagggtttccgccagggtgcggatctcggtgatgtcgctgttgatgccgatcatccgcaccggccgattgtcctcgtcgcgagtcagcgtggcgatcgcccgcaggtggcgaacctcgcggttggggcggacgatacggaactcgcagtcgaatttctgcaacccgctgacggcgcgctccagctcgcgcagcacgcggtcgtgatcctcggcatgcaggctcgccttccactgctccaccgtggtctcccccggaccgctgcggatgccgtacaggtcgaacatgcggaaatcccagtgcaggcggttgcgcgccaggtcccactcccagatgccgatctgcccggcgtcggtggccagcttgatccgttcggcgaggcgctcgcgctccagctcggcacgcttgcgactgtcgatatcctccacctgggtgacgaagtactgggcgactccctcctcgtcgcgcaccagcgacacgctgatgcgcgcccagaaggtttcgccgtcctggcgcaggtagcgcttctccatctggtaggagttgatacgcccggcgagcaggtcgcgcaccaggtcgaggtccagttccaggtcgtccacataggtgatctcctggaacgacagctcgcccaggcgttcggcggaatagccgagcatccggcacagcgcctcgttgaccttgaacagccgcccctccagcgacaccagggccatgccgatcgccgagaattccatggcgccgcggaactgcgcctcgccgatggccacctgatgctgctcgcggcggctgcgctccatgatcaccgagaccaggaaggcgggaatgagggtcaaggccatcggcaggtacagcagcggctcgccgaaacgctgctgggacgactcggggaggaacacgccgagggcgatcagcacggcgatgaaacaggtgttcaggcaaccgatcagcgcggtaccgaacacgctggtgctggcggcggccaccagcagcggcaggagcacgtagatgaaggcgtagggcaggcgcgtcagggccacgaagctgatcaccagggtcaccagcaggagcatcgcgttgtccactcccgcccgccccgacagagcgtgacgccaggccgccaggttgctggccatgcacaacggcagcagcgcgagcatgcccatcgcatcgcccacgtaccagcgcgcccacatttccgggaaacgccccatgccgaagacgctgaccagcaccgcgcccaccgaggcgccgagcaagggcgggatcagcgcgccggcccagagcacgcgaaccgccgaatgcaggttgaattcgaagtcctcgcgcacccggttgatgcgtaacagcatcgcggcgaagatcgcttcgctcaggttggccggcaggaacgccgcgctcatccacaggctgtcgccatacaggcggttggccgccaggttggccacggcggagcagagcaggatcgccggccactggcgcagcggcgcgcgcagcagggcggcggtgaggatcgcgttgggcagccagatcgccgcgatggtggcaggctgacgcgacaggtagatgcaggccagggcggcgagaaagaacagcacaccggcctggatgcccgcccacaagcccctgtcgtcggttttgccactgaacatccgctcgaatccccggtacctgcgtcaaaggaactgcgccagccgaacagacttcagcgtagcgcggaaacacctcagacgtaggtaacggccgccaagtctcagactgtagcgaaacgtatgcggaagcaggcgccgcccagctcggaatcgtccaggctcagttcgccgtcgtagctctcgatgatgtccagcgccacggccaggccgatgccctgccccgggtgctgggtatcggcgcgctcgccgcggcggatgattcgtgcgcgctgttcggcaggcactccgggaccgtcgtcctcgacccacagctccgagtaacccggccccagccgggcgcccacgcggacccggcccaggcacaggcgataggcgttctccagcaggttgccgagcagttccagcagcgcgccgcgctccaccggcacgctgaaggacggcgagaagtcccgctgcaggcttacccgcttgtcgcgatagaccttgtccagcgcgtcgcacagggtctccaccagcggcgccagttgctcgcgatggcgtaccaggccgctcttgcgcaggctggcgcgctgcaactgatagcctatctgctggctcatgcgctcgatctggccctgtagcacccgcacctgctcgcggttgccgggctcctcggcgagctggtcgccgaccccctgcaagaccgccagcggcgtcttcaggctgtgcgccaggtcgccgagggagtggcggtagcgctcgcgctgcttgtgctcgctgcgcaacaggcggttcagcgagtgggtcaggcgcagcagctcgcgcggatgctcctcgctcaggctctcgcgctcgccggattcgatctggtccagctcggaactcaacccgcgcatcgcccggaagccccaggtcagacccagccaaagcagcccgagcaagaccagcagggcgccgccgagccacaggtagagctgctcgcggaaccccttgagcaggctctcgaactcgctgaccgattgcatggtgacgatgctgtaggccgcctgcttgccgcgcagcaggtcgatctcgacgtcgaacacgaagaactcctcgcccttcgcatcgcgggtggtgtggaattcgttgccgcggccgtcgtagcgcggcgtgtagttgatcgactcgtcggccgccgaggtggagcgccagagcagatcgccattctggtcgtagatatagccgaggaccttggcctccggcaggttgaactcctccaccggcaggtgctcgggcatcaccaggcggcccttctccacccgcgccgccgagaccagggtcgccacgtcggcggccaggcgctgctcgatggtgttctccagggcgatgccgaaggcccgctgcagggccggcagcagcgccagcatgaacagcaccgccagggcggcggcgccgagcatcagacggatgcgcagggaacggatcaccggcagcgctcggtgaacaggtagccctggccgcgcaccgtatcgatcggcttgaagccgccgcaggcctccagcttgcgccgcaggcggccgaccagcacctcgatgacgttggcgtcgcgctcctcgtcgtcgggatagagctgttccatcaggcgttccttggccaccacctgctggtgatgccgcatgaggtattcgaggatgcggtattcgtaggcggtcagcgccaccggttgctcctcgaccagcgcctgcttgcggttcaggtcgaggaccagggggccggcctcgatggtcgactggacgaaccccgaggagcgtcgcagcaacgcgttcaggcgcgcttccagttcctcgaactggaacggcttgaccacgtagtcgtcggccccggcggccaggccttcgaccttgtcctgccagttgccgcgggcggtgaggatcaggatcgggaaggacttgccctgcgaacgcagctcgcggatcaggtccaggccgctcatgcccggcaggccgaggtcgatcaccgccaggtcgtggtggtattcgctgacccggtagagggcttcctcggcatccggtaccgcgtccaccacgtgcccctgttcacccaggcgggtatagaggtggtggcgcaacagcgcctcgtcttccactaccagcagtttcatgaggttcctccggatgagatgcggccggaccttccggcccggccatcgaagcatgccctcgcgggcgctgcgcggtcatttagaacttgtagttggcgcccaggtagaattgcgagctgctgtgcaggtccagggagcccagcttgttgccgccatgcggggtcatctcggtgctggcgttggtgcgcaggtaacgatagccgccttcgatcgaggcattcttgctcagctcctgcaggataccggcctgcagcccggcagcgtagccgacatcgctgtcgcgcttgaagcccttgccgtcctgttccagcttgaccaggccgagggtggcaccgccgaacagcttggtgttgttgtcgccgatcggcaggaaggcgtcgtagctgccgagcaggttctgctggcgcagcttgttgccgctgctggtgtcggagatgttctcgtaggtcgcgtagtagcggccctgctcgaactgctggccggcgcggatgccccaggtgccggtgttgtcgatcaccttgtcgaggttcgggctgttcaggttgcggttcagcgacttggatttctggatgttgttgctggtctcgccccaggtcaggccgacgaagttgtcggcggcctggacgccggcggcggaacccagcagggcggtggcgatgaagagagtcttgagtgctttcatggtctttctccgttctgcgagagtcgtgtcgttcacggcttgcagagtacggacagggtactgaaccgcccctgaacgcttgctgaacccgggctgaacgactcgcgtttgccggcgaacgctctgtttccaggctgccgcgcgccggctcggcgaggtttttgcccgtactgcaagtagggtctaggctttctacagtcgcctgcatagaggctgggccaatgaacgaacaacccgaccagggacgcgtcaagggcatggaagccaggctcttcctgtttctcgtgatctgcctgttcccgctgctgtccgtcgcactggtcggcggcttcggtttctgcgtctggatgtaccagctactggccggcccgcccgggccgccggcctgaggtcgggtatgagcagtcgccgagagctgttccgccgcctcggcgggcacccgccgacgcgtcgcccgccgtggaccgccgccgacttcgccgcaggctgcacaggctgcgccgcctgcgtcgaggcctgcccggaaggcgtgctgaagctcggcgccggtcggctcgtcgaactcgacctctccagcgccggctgcacgctgtgcggggaatgcgccagccgctgcgaggccggcctgttcgatggcgcgcgcccggccttcccctggatcgccacgatcggcgaagcctgcctggccctggccgggatccactgccgcagttgccaggacgcctgcgaacccgccgcgatccgcttccgcccgggccccggcggcgtcgccctggccgagctggacagccagcgctgcaacggctgcggcgcctgcctggcgcactgtccgagccaggccatccaactgcgcgcgctatccaccaaggagtctccacgacatgcctgaagccctgcagatcgccagcctcatcctgcattgccggcccgagcgactgccggcggtgaaggccaacctggcgctgctcgacggcctggagatctaccaggaaagcccgcagggcaagctgatcctggtgctggaagccgaacgcgaagaacagattctcgacaccctgggccagttgcagaacctgccaggagtgctcaacgccgtgctggtctaccacgagatcctgcacgacgacgatagcaacgacgcggcggccatgaccgaccgcgcgataccgtgctcgcccgaggagacaatcgatgaacctcacccgtcgtgaattcgccaaggccaacgccgccgccatcgccgcggcggcggccggcctgccgatcctggtccgcgccagcaacctggtgaccgaggcggacgtcaccagcctggtctggaacaaggccccctgccgcttctgcggcaccggttgcagcgtgatggtcgccacccgcgacggccaggtggtggccacccatggcgacatcaaggccgaggtcaaccgcgggatcaactgcgtgaagggttacttcctgtcgaagatcatgtacggcagcgaccgcctgacccgcccgctgctgcgcatgaaggacggcaagttcgacaagcagggcgagttccagccgatcagttgggaacaggccttcgacatcatggccgagaagttcaaggccgcgctcaaggccaagggaccggagtcggtcggcatgttcggctccggccagtggacggtctgggaaggctatgcggcgaacaagctgttcaaggccggcctgcgcagcaacaacatcgaccccaacgcccgccactgcatggcctcggcggtgatgggcttcatgcgcagcttcggcatggacgagccgatgggctgctacgacgacatcgaggccaccgacagcttcgtcctctggggctcgaacatggccgagatgcacccggtgctctggtcgcgggtcaccgaccgccggctcagcgcgccgcaggtcaaggtcgcggtgctgtccaccttcgagcaccgcagcttcgagctggccgacctgcccatggtgttcaagccgcagaccgacctgatcatcctcaactatatcgccaaccacatcatcgagagcggcgcggtgaaccgcgacttcgtcgagcgccacgtgcgcttcgcccatggcgccgaggacatcggctacggcctgcgcccggacgacccgctggagaagaaggcgaagaacgccgacaaggccaacacctggagcgatatcgacttcaaggccttcgccgagttcgtcaagccctataccctggagcgcaccgcgcgcgaaagcggcgtgccggccgagcggctgaaggccctcgccgaactctacgccgaccccaagcgcaaggtggtgtcgttctggaccatgggcttcaaccagcacacccgcggggtctgggcgaacaacctgatctacaacatccacctgctcaccgggaagatcagcgaaccgggcaacagccccttctcgctcaccggccagccctcggcctgcggcaccgcgcgcgaggtcggcaccttctcccaccggctccccgccgacctggtggtgaccaacccgaagcaccgggaaaccgcggagaagatctggaaggtgccggccggcaccatccaggagaaggtcggcttccacgccgtgcagcagagccggatgctcaaggacggcgtgctcaacgtctactggacccaggtcagcaacaacatgcaggccggtcccaacgtgatgcaggaagtgctgcccggctggcgcaacccggacaacttcgtgatcgtctccgacgtctaccccaccgtctcggcccaggccgccgacctgatcctgcccagcgccatgtgggtggagaaggaaggcgccttcggcaatgccgagcgccgcacgcagttctggcaccagttggtgaaggcaccgggcgaggcgaagtccgacctctggcagctggtggaattctccaagcgcttcaccaccgacgaggcctggcccgcggaactgctggcgaaggcccccgagctgaagggcaagaccctctacgacgtgctgttccgcaacggccaggtcgaccgcttcccggccagcgacctggccaagggctatgccaacgacgaggtcgacgcattcggcttctatatccagaagggtctgttcgaggaatacgccgccttcggtcgcggccacggccacgacctcgcccccttcgacgcctaccacgaggcgcgcggcctgcgctggccggtggtggacggcaaggagacccgctggcgctaccgcgagggctacgacccctacgtgagcaagggcagcggcgtgcagttctatggctatccggacaagaaggcgatcgtcttcgccctgccctacgagccgccggccgaggcgccggaccaggactacccgttctggctcgccaccggccgggtgctcgaacactggcacaccgggagcatgaccgcgcgggtcccggagctgtacaaggcggtgcccgacgcgctggtctacatgcacccggaggatgcgcgccagctcaagctgcgccgcggcagcgaggtcaaggtggtgagccggcgcggcgagatccgcgcgcgggtcgagacccgcgggcgcaacaagccgccccaggggctggtgttcgtgccgttcttcgacgccaacaagctgatcaacaaggtcaccctggacgccaccgacccgatttccaagcagaccgactacaagaagtgcgccgttcgcatcgaactgctcaacctggcctgaggagcgcgccatgaaacctctgctgactgccctgctcctcgtcctgctcggcgcccccgcggccttcgccgccgacctcggctacccgctggacgcgcccgcccccgacggccgccgccccggcggcacgctggccgaaagccgccccgcgccgccgctggcggccgaggaaaacaaggacctgaaacgcgagcgcaactaccccgagcagccgccgaccattccccacagcatcgtcggctatcgcatcgacaaggacagcaacaagtgcctgtcctgccacagccgcgccaacagcgcgcgaacccaggcggtgatgatcagcatcacccactacatggaccgcgacggccagccgctggccgccgtctcgccgcgccgctacttctgcgtgcagtgccatgtgccgcaacaggacgtaaagccgctggtcgacaaccgcttcgagaacatcgaccagatcctcgagaaagaagccgccaatgcggcgcgcaaaccctgagggaggccgcatgaaagcactcatcgcctggctggccggttactggcgggtcctgcgtcgtcccagcgtgcatttcagcctgggcttcctcaccctcggcggcttcatcgccgggatcgtcttctggggcggcttcaacaccgccctggaggcgaccaacaccgagaccttctgcatttcctgccacgagatgcgcgacaacgtgttcgtcgaactcaaggacaccatccactacagcaaccgttccggagtccgcgccacctgtcccgactgccacgtgccacacaagtggaccgacaagatcgcgcgcaagatgcaggcctccaaggaggtctggggcaagatcttcggcaccatcaacacccgcgagaaattcctcgatcaccgccgcgagctggccgagcacgaatgggcacgactcaaggccaacgattcgctggaatgccgcaactgccacaacttcgagttcatggacttcacccggcagagcgtgcgcgcgcggcagatgcactccaccgccctggccagcggcgaagccacctgcatcgactgccacaaggggatcgcccaccacctgccggacatgaccggggtgaagggctggtagcgccgcccgcggaccgggcggcgcggcgcaatcagggctgggcgcccttcagcgcctcgaggaccttgcgcccggcgcgaccgtcggccggggtcaggccgaggcgcttctgctcggcctggatcgccttgcgcgtgctggtgccgatcagcccgtcggcctcgccgatgtcgtagccgcgcgccagcaacgccttctgcaattgcttgcgctcgagccggctgatgcccgggtcgtcggtcggccaggacgccaccaggccgctgccgccgcgcaggcggtcggaaagcagggcgatggccagcgcgtagctttccgcggcgttgtaggaatagatcgcatcgtagttgcgatagaccaggaaggccgggccctgggccccggccggcaggaggatcgcggccttctcgtcgccgcccggcagcggctggccgtcgacccgcctcaccccacgggcgacccaggccgacagcggctggcgcttgccgcgcccggccaggctggcggggaagtcggccggcaccttcacttcatagccccacggctgtcccgtgcgccagccagccttcttcaggtagttggcggtggaaccgagggcatccggcacgctgcccaccaggtcgcggcgaccgtcgccgtcgaagtccacggcgatccgcgcgtaggtcgatggcatgaactgggtatggccgaaggccccggcccaggagccggtgatgccggcgtcgcggatgtcgccggcctgcaacagcttcagggtggcgaggaactcgccctggaagaacgactggcggcgcccgtagcaggacagggtcgacagcgaggtcagcagcggacgcttgccgaagatccgcccgtagtcgctttccacgccccacaccgccaccaccgtgtacttgtccacgccgtagcgcgcggccacctggtcgagcagcttgtcgtgctgggcgagcatcgccttgccatcgctgacccgctgctcgtccaccagaccggccaggtagtcccacagcggggtggtgaactccggctgcgcgtcgagcaggtcgagcacgctgaggtcggcctgcaggccgctggtgaagcgctcataactgtcggcggaaatgccctgcgcctgggccttcttctgcaggccggcgaggcaggaagggaagctcgaggcgtcgggttgcgccagggccagggcgggtagcagggccagcgaggagagaagaagactgcgcatggggtttccttgtacggtgaacggtcatccatggcaccggcgggcttccccccggcgccgaaggcctggcggcctgtacggttgactcggtgatcggcgttcgactggtcgagtcagccacacgggccactagcctaccgtcccgccgggtgcggcgccatctccgccctgaaaggcgggtgaaaccttgctcgggcagactggcggcggaatacgcatgccgggtgtctcgcggccgatccgccgcgtcacatccgtgcccgaacgcgctgcgccacccgcgcgtccgttttccgggcactggccgggcgttcgccggtccaagcagtgttccccgcctccgtccacaagccggagccggccccgacggtcccagaccaccgcaggaaagccgggcggccgccacccgccaccgccccgggctttccaccctcactacacgtttcggagtacaaccttgatccactggttgagcgacccgacgttctggacagccctgctgcagatcgtcgccatcgatatcctcctgggcggcgacaacgccgtagtcatcgccctcgcctgccggcacctgccggcgcaccggcgcaagcaggcgatcttcggtggcgtcgccggcgccatcctgatccgcatcctgctgctgttcttcgccctgcacctgctcgacctgccctacctcaaggtaatcggcgcgctcctgctgctgtggatcggcatcaagctgctgctgccggaggaggagaacggcgacgacatcaagggcagcacccacctgctcggcgcgatcaagaccatcatcatcgccgacgcggtgatgagcctggacaacgtcatcgccctgtccgccgcctcggccggggatttcttcctggtctccctgggcgtgctgatcagcatcccgatcatcgtctggggcagccagctgatcctgcgcctgatcgaccgcttcccgctgatcatcctcttcggcggcggcctgctcggctggatcgccggcggcatgctgctcaccgacagcgccctgaagccctggctggcgccctacgcgcaatgggattcctacctgcactacggtgcggcggccttcggcgcgctgttcgtgatcctcctcggcagcctcctggcgcgccgccagttgaagcagcggcatgccgcgccggcggacgccgccgaaagcgaaggccgctaagagcaacggggcgcccgggggcgccccgtcctctttctccggctcagatattggtgctcgccgggatccggctcggcaacaggtactcgtagggcctgcggcgcgcctgattgcgcgtgcgaatggtcgcctcgacctccttcaggcgtgcctggaagcgctccagcgggccgccgctggcggtcacccgcctgtccgaaaacaccggcgcgtaggggaacccggtctgccggtagtcgcccaggcgaccgtggtagaccgaaccgagcaggtgatagatattcaccttctccagcgccaccagggtcggcggcatcatcttcaaccaatcggcctcgctcttgccgcttggcgagtccggtgccggcgccgcgctcatggcacagatggctggtgcgtaggtcatcatcgaaggctggggaaaattgaccgccgcatgctgcgcggaggcagtgaagatcaccatggtcagcacctcgaccagttggctgcgaccggtgatcgggcggaacccggccaccttgccgctgccgatcacttcgccgacccaggccgccagttcgacgtcagcggtgacgtcgccgtcgctggcgtagtacaccgccacgtagtcggccgcccactggcggatggcattccataccagcaggccgtcgtcgcgataggggtagtccggtagcgccagcgggtcgtcgacgttccgcgccttcaggctctccggcaacatgccgcggtagaagtcgaaacccagccgattgccgccggcggtggcctgggtgtcctggatcggcgcggcgaacatcacgtcgatgaagcccgcgctgggcaacaggatccgcgccgccccctcgttgatgaacagggtgccctcgaagtgcggggcgagcaggacgtgcagcggatggctgggcgccagggtgcgctgggtggccaggcagaacgcctcgctcaccaggtgggtctgggccaggtggacgaacatctcgtggtagttctcctcggcgacctggaccaccgtcttggccatctgccaaccccagtacagatcactctccgactcggcgggacgcacgaacatcggataggtagcggggtcctgaccgcactggatggccaccggcaatagcctcgcccgatccttgccaagggcgaacagggcgatcggcgcataggcgaagcccgtcccggtgagcagtttgtccaccgctcccgacggcgccagcttgcccagctcggcgtagtccagcaggtacaggcggcggctggcggcggcctccagcaagctgtcgtcggcgcccatcacccggcggaactgctcctcgcccagcggaaagttggccggcagcgcatcgacgcgacggatcagcagcggattaggcccggccacccgccagtaggcgaacgcttcgtcgtcacggaagctgtcggcgacctccggcaggcgcagggtgccgaacaccgcgcggaagcgattcaggccgtcgccctgccccccctgggtaaccaggttgctggcgctcttgagaatatcgtcgaccagcaggccgacccgcgtcagtaaggcgatcacccgcgtctgcaactccgtgaagcgcagcagcaggctgccggccgcggccggatcgttcttcgcctcctccagcaacgcctcgtggacctggcgcgccgcctccaggtcaccgctgagcccggtggcgatccgctcgaactgcgcggcggccgacgccggcaacgaggcgacgaaattgacgatcagctcgacgatcaccccggcggtcttcaacagccagtcgacattcggcaactcgcccagcggcaccgagcgggccatcggcacgcctttgacattgacgaagttctcggtccagacatataccagtttcttgctggtcaataccgcacgccgcgccaactttccggccaggttgtcatattgcggcaaactcggcggaatcaggttgtccagcaaacttcgcgaggcatcgatagatcgctgttgttccgccccgaggtatttcaagggtgaaaagaatatcgagtcattggccagtgcggttccactcagggcgacacccgacaagagcacactcctgcgtttcatatcatcgactccatcaatgcattaaccaggaacgactcgatgcctgagcatcgaatcgctctttcaacaggttgcgatcagctgtaaagcccttcgccgctttccttgttgtaatgcaacggaacattgtggttgtcggtcccgccgagaatcttgccgacggtgatcgccgccaccgaaggcacctggaaggccagcaggtcgaccagctcgtgggtacggttgaggccgatggcgctggccgcgttgccgatgctggagaacagcggcgagttcaggaaggagttggccgcgtagacgccgttgatgatggcatcgcccaggaaagtcccggcgccagaaacttgttcgatttcacccacacttagaaccgccagggcattcacctgatttttcatttctgaatctccacatattcgaattgttgaaacgaatggttctcgctgaaaacagcaaagaaacctgtacgcccgaacttcttcggaacgtggagaaagcaatagcgagaggaaaaaccggcaataagctgacgcttcgcacagttgacaggaaaagcctggaacaatagttatccacaataattattgacggcgaacttttgacttgcaaagaactacgctggccagcggcaagagtgaatttcatccagccagggctataccaaccgtgcaaacccggaagggcgctgcgcaaaacgtcacatttattcggggcgatacgccaaggcggctccctgtactgaagtaccagaatcgccagatcgcgcggcctatttccccttggaaaaatacggatatttttttccgggccaggttttccttcttccgcgcctgccagatctggcagttgcgaagcgccacgacaacgcgaagtccgcggcgcagatgcctcgaccgctcattgatggctaacgcgcagctcgctgaatgtcgcccgcccgccctcgctggacggtccgcggttgtcctgcaggtagagtccggccttgaaataaaggccctggtaggcccactgcgggtccagttgctgctccagggcgctaccattcaccgacacgctgagcaatccgctgcgagacacgccgatgcggtagctgaacgactggccgagaggaatcccgtccatcagtgtgtaggctctggtcccgccgtcgtccggccgctcgcggaccagcgcctggacccgcccctggtcgagccgcaactggtagagcagcttcaccagcggcgcggcttggccgctattgctgccatcgctgtggatctggccgatgatcatgcgccgggtcgagggcaccgcctcgatgcgcagggtcgcctccagccagttgtcggccctggcgtaacgccagttgtagggcctgccgctggacagggtctcgcgcaactcgctgcgcgggaactcgctgttgcgcgtgtggctgccgttcaccggcacccagaagcgaatgccgtcggcggtgcgctggaaatagtcgctgcggtagtcgcgctgcaattggctggtggagatggtgatggccgggcggccctggggaatggtcaggttccaggtactcaggtcaggcatccagacggtgtcctagcgaggggaagggactcgcccatagggtagatgagcggcgcacgctttgcctggccgaatggcccgcgtttgagcggcgcaaggccggcaccgagggttttccccgcgtcccgcgcacaagcgtctatcttgatcggggaccctttcacggagagatgccatgcgcctgctctgcgccctgctgctcatcgcctgcgccgccagcgcccaggccgctatccagacccgcgagatgccttaccggagcgcagacggcacgcgcatggtcggctatttcgcctacgacgacagcaagccggggatccgccctggggtcatcgtggtccacgaatggtgggggctcaacgactatgccaagcgccgcgcccgcgacctcgccgaactcggctacagcgccctggccatcgacatgtacggcgaaggcaagcacaccgagcacccgcaggacgcgatggccttcatgcaggccgcgacccgggatgccgacgccgccaaggcgcgcttcctcgccggcctggaactgctgaagcggcaaccgcagaccgatcccagccagatcgccgcgatcggctactgcttcggcggcaagatcgtcctcgacatggcccgccagggcctgccgctggccggcgtggcgagcttccacggcgccctcggcaccgccaccccggccagcaagggcagcgtcaaggccaagatcctggtggagcacggcagcgccgacagcctggtcccggccaaggacctcgacgccctgaaacaggaactgaacgccgccggcgccgactaccgggtggtgatccaggacgacgccaaacacggcttcaccaaccccgacgccgacgcgcacaagggccacggcctggacatcggctacgaccgccaggccgaccggcgctcctgggcagacctgcaggcgttcctcaaggacatcttcgggcagggttgaaccctgcgccgacgcataaaaaaacgggagtccccggagggactcccgtcttgaaaggtcgagacaggacagtatcccgtcatcaacaaacaacctcacctgcattccactggaatgcgcggcgcagtctgtcaaaaccgggccttgcggtccgttttcctttgttgcgcttttgcaatcttgtgtaagcgccacgtgactggtgggccacgtcgggaaccggcacaatgcgcgccatgaacgaccgtctcccctccttctgcaccccgctggacgaccgctggccgctgcccgtcgcgctgcccggcgtgcaactgcgcagcacccgcttcgacccggcgctgctgcaacccggcgacttcgccctggccggcatccagccgccggcgaacatcctccgcgcggtggccaagcgccaggccgagttcctcgccgggcgcctctgcgcacgcgccgccctgttcgccctcgatggccgcgcccagaccccggccgtcggcgaggaccgcgcaccggtctggccggccgcgatcagcggctcgatcacccatggcgaccgctgggccgccgccctggtggcggcgcgcggcgactggcgcgggctcggcctggacgtggaaaccctgctcgaagccgagcgggcgcgctacctgcatggcgagatcctcaccgaaggcgagcgcctgcgcttcgccgacgacctggagcgacgcaccggcctgctggtgaccctggcgttctcgctgaaggaaagcctgttcaaggcgctctatccgctggtgggcaagcgcttctacttcgaacatgcggaactgctggaatggcgcgccgacggccaggcccggttgcgcctgctcaccgacctgtcgccggagtggcgccacggcagcgagctggatgcccagttcgccgtgctcgacgaacgcctgctcagcctggtggcggtcggcgcctgatcaggcgttccccggcgtgcgccgcgacggccgcagcgcgcggccttccgccaggcgctcgacggcgcgggcggcggcgaccatgccgaaggtggcggtgaccatcatcaccgcgccgaagccgccggcgcagtccagcttcaccccttcgccgacgaaactcttcgattggcacaccgtgccgtccggcttcgggtagcgcagctgctcgctggagaacacgcagggcacgctgtaggtgcgccccggcgtgcgcgagaagttgtagtcgcggcgcagggtggaacgcaccttggccgccagcgggtcgttgaaggtcttgttcaggtcggcgacctggatctgcgtcgggtcgacctggccaccggcgccgccggtggtgatcaccgggatcttgcgccgcttgcaccaggcgatcagcgcggccttggcggccacgctgtcgatgcagtcgatcaggtagtcgaagtcgacgatgtactcggccatggtctcgcgggtgacgaaatcggccaccgcgtggacccggcaggccgggttgatggcccggatgcgcgccgccatcacctcgaccttggccttgcccaccgagccttcgatggcatgcacctggcggttggtgttggtcacgcagacatcatcgaggtcgaacagggaaatctcgccgacgccgctgcgggccagcgcttccgccgcccaggaaccgaccccgccgatgccgaccaccgcgacgtggctatcggccaggcgttgcagcccctcgcgaccgtacaaccggccgataccgccgaagcgctgttcatccacctgcatcaccaaccacctctgaaaccgaatcgcggattgccgcgcgcattataaaaagccgcggccgccgcgtcgcctgcgttcttacggctcgtcgcgcaggccggactagacttgcaacagacccgccggcccggcgcctgtacaccccggggggtgcggggtagcatgcgccgccccgtgttcagcgaaacatccggaacctggtttcatctctatgtcttcacgcaagatcgggctcaacctggtggtcatcgtcgccctggccgccctcttcaccggcatctgggccctgtacaaccgtccggtcagcgtaccggactggccggaacgcatctccggcttctccttctcgccgttccgcctcaaccagaacccgcagagcggccgctaccccagcgccgaacagatgcgcgccgacctggaactggtcgcccggcacacccacagcatccgcacctattcggtccagggcgcgctcggcgacatcccggcgctggccgaggcgttcggcctgcgcgtcagcctgggcatctggctcggcccggacctggccggcaacgaggccgagatcgcccgcgccatccgcatcgccaacgagtcgccgagcgtggtgcgagtgatagtcggcaacgaggcgctgttccgccgcgaggtgacggcggaacagttgatcgcctacctcgaccgggtccgcgcggcggtcaaggttccggtgaccaccgccgaacagtggcacgtctaccgcgaacacccggaactggcgcaacacgtcgacctgatcgccgcccacgtcctgccctactgggaggccacgccggtggccgacgcggtggacttcgtgctcgaacgcgcgcgcgaactcaaggccgccttcccgaggaagccgctgctgctcgccgaggtcggctggccgagcaacgggcgcatgcgcggcagcgccgaggcgacacccgcggaccaggccatctacctgcggcgcctgaccaacgcgctcaacggcgaaggctacagctacttcgtcatcgaagccttcgaccagccctggaaggtcagcgccgaaggctcggtgggcgcctactggggcgtctacaacgccgaccgcaaggccaagttcaacttcaccgggccggtggtgccgattcccaagtggcgcgccctggccatcgcctcggcggtactcgcggtactcgccttcaccctgctgctgatcgacagttcctcgctgcgccagcgcgggaggaccttcctcgccgtggtctcgttcgcctgcgcctcggtgctggtgtggatcgcctacgactacagccagcagtacagcacctggttcagcctgaccgtcggcgcgttgctgggcgtcggcgcgctgggggtggtcatcgtgctgttcaccgaggcccacgagctggccgaggcggtctggacgcgcaagcggcgccggccattcctgccgatcaccgccgcgcaggcctatcggcccaaggtgtcgatccacgtgccctgctacaacgagccgccggaactgctgaagcagaccctcgacgcccttgcccgcctcgactacccggactacgaagtcctggtgatcgacaacaacacccgcgacccggccgtctggcagccggtcgaggcgcactgcgcgcgcctgggcgagcgcttccgcttcttccacgtcgccccgctggaaggcttcaaggccggcgcgctgaacttcgccctgggccacgtggcggcggacgtcgaggtggtcgcggtgatcgacgccgactactgcgtcgaccccgactggctcaggcacatggtgccgcacttcggcgacccgcggatcgccgtggtgcagtcgccgcaggactaccgcgaccagcacgagagcgccttcaagcggctctgctacgccgagtacaagggcttcttccacatcggcatggtcacccgcaacgaccgcgacgcgatcatcgagcacggcaccatgaccatgatccggcgcagcgtgctggacgagctgagatggccggaatggtgcatcaccgaggacgccgagctgggcctgcgggtgttcgagaagggcctgtcggccgcctacttcgagcgcagctacggcaagggggtgatgcccgataccttcatcgacttcaagaagcagcgcttccgctgggcctacggcgcgatccagatcatgaagcggcataccgacgccctgctgcgcggccgcggtcccgacggcagccgcctgacccgcggccagcgctaccacttcgtggccggctggctgccgtggatcgccgacggcctgaacatcttcttcaccctcggcgcgctgctctggtcggcggcgatgatcatcgtgcccaagcgcgtcgacccgccgctgctgatcttcgcgatcctgccgctggccctgttcgccttcaaggtcggcaagatcctcttcctctaccggcgcaccgtcggcgtcgacctgcgtgactcgttcttcgccgccctcgccggcctgtcgctctcgcacaccattgccaaggcggtgctgtacggcttcgtcacccgcggcatcccgttcttccgcacgccgaagatgcgctccagccacggcctgctggtggccctggcggaggcccgcgaggaagtcttcgtgatgctcctgctgtggggcgcggcggccggcatcgtggcggttcagggcgtgccgagccgcgacctgctgatctgggtcgccatgctcctggtgcaatcgctgccctacctggcggcgctggtcatggccctgctctcgtcgctgccgaaaccgcgcgaggaactggccggcggcgccgagcggatcggcggttgaggtcgagcgaggcgtcgggacagccggctccgctcgcctaaacggcgtcccttcgcccgcgtttatgctttaagattccccctttccgctcgacccgctcaggatgccctccccatgaccgcctcttcgccgagtctctcgccgaccctcgaactcgcctgcgagttgatccgccgcccctccgtcacgcccctcgacgccgactgccaggccctgatgatgcgccgcctggaagccgccggcttcgccctggagccgatgcgcatcgaggaggtggacaacttctgggcacggcgcggcggcgacggcccggtgctgtgcttcgccgggcacaccgacgtggtccccaccggcccgctgcaggcctggcagcaccaacccttcgacgccctgatcgacgaccagggcatgctctgcgggcgcggcgcggcggacatgaaaggtagcctggcgtcgatgatcgtcgccgtcgagcgcttcgtcgccgaccacccggagcacaagggtgccatcgccttcctcatcaccagcgacgaggaaggcccggcccaccacggcaccaaggcggtggtcgaacgcctcgccgcacgcggcgagcgcctggactggtgcatcgtcggcgaaccgtcgagcaccagcctggtcggcgacgtggtgaagaacggccgccgcggctccctcggcgccaagctgaccatccgcggcgtacagggccatgtggcctacccgcacctggcgaagaacccgatccacctggccgccccggcgctggccgaactggcggcggaacactgggacgacggcaatgccttcttcccgccgaccagcttccaggtttccaacctgaactccggcaccggcgccaccaacgtcatccccggtgaactgaccgcgctgttcaacttccgcttctccactgaatccaccgtcgaaggcctgcagaaacgcgtcgaggcgatcctcgacaagcacggcctggactggcacgtcgaatgggcgctgtccggcctgccgttcctcaccgagccgggcgaactgctcgatgcggtggccgccagcatcagggcggtcaccggccgcgagacccagccctcgaccagcggcggcacctccgacggacgcttcatcgccaccatgggcacccaggtggtcgaactcggcccggtcaacgccaccatccaccaggtcaacgagcgggtcctggccagcgacctggagctgctcaccgaaatctactaccagaccctggtgaggctgctcgcctgatgctgatctgcccgctctgctccgccgccctgggcgaggtcgacaacggcgtcgcctgccccgccgggcaccgcttcgaccgcgcccgccagggctacctgaacctgctgccggtgcagcacaagaaaagcctcgatccgggcgacaacgccgccatggtcgaggcccgtcgccagttcctcggcgccggccactacgcgccgctggcccggcgcctggccgaactggccgtcgaacgcgcgccgcgacgctggctggatatcggctgcggcgagggctactacagcgcccggctcggcgaagccctggccggcgccgaaggctacgccctggacatctcccgcgaggcggtgaaacgtgcctgccgccgcgcgccgcagttgtcctggctggtggcgagcatggcccggctgccgctggccgacaccagttgcgagctgatcgccagcgtgttcagcccgatcgactggaacgaagccgtgcgcgtcctcgcccccggcggcggcgtactgcgcctgggcccggccagcgcgcacctgctggaactgcgccagcggctctatgacgacgtgcgcgactacgccgacgacaagcacctcgccggcctgcccgcgcaactgcgcctgcgccacaccgagaccctcgagttccgcctggcgctggacagctacgacgcgcgggaaaacctcctggccatgaccccgcacggctggcgggtcaaccccgagcgccgcgcgcgaatcctggccgaacccttcgaagtcagcgtggcggtgcgctacgattggctgcaacgcgactgaccgtccccgaggaccccatgcgccaaccggatatcgagatctacctgaaagacgccgagcacgcggccgtcgccgcctggctggaacaggcgctgggaccctgcggcccatggcaggagcacggccagaccctcaagtgcaccgcccgcggcgagcacggcgcggtgcgcgtcacctggctgccgaaggcggtgggcaagtggcacagcctgttcttggagagcgacagcacgccctgggacgacgacctcgcctgcgccagggccgcgcatgccgcgctcggcgtggagatccgctgcgcgccgggcggctgggaggaaaaccagggcgaagaggacgccgaccgctggctgcgggtcgacgccgggggcgtcgaggaaattacctggcgcacggcctgaacgacgaaaaccccgcgctgcgaggggccacccaacgggggcctggcggggtggatgcgctggatgacaaaagcccgtctcgcgacgggcttttgcttgcgggaatcagaccttggagacgtcttccgcttgcaggcctttctggccctggatcaccgagaattccactttctggccttccaccagggagcggtgaccctcgccgcggatggcgcggtagtgaacgaacacgtccggaccgctatcgcgttgaatgaatccataacctttggcgtcattgaaccacttgacggttccgacctcacgatcagccattaccacactctccaacttgcaattttttataagtggccttcccaatccgggaagacttcgacggttcggctgcgcaacgctgttcttgttatccgaccccggcaaaatgccgttggagcgggcatttcgaatggcgttccactagccaccgcgtcccggagtataaacaaacgagtccaactgaaaaggacttttttagcccctggcggaatactcgccacgcccggcgggactggcctttcgatatgttttcgctacgcctggaatacgtctgcgcatgcacttgcagatagctagccgccatatttccgtcggcttttcagcggtcgcgcagacccgccttgcgcggccaggccagggtgaagcaggcaccgcccagagtctcgctgcggccgatggaggcccggccgccatgccagtagacgatccgccggacgatggacagtcccaggccatgcccgccggaagcacgggtccggctatcgtccaggcgtaggaatggcgtaaagagccgctcccattgcgcctccggcacccccggcccgtcgtcctcgacatccacccggcaacgctccaggctgacccggtagctgatcctgacccgacgatcggcatgccgcagcgcattggtcagcaggttctgcaaggcccgatgcaggtagcgcggctcggcctcgatccaactgcccagctcctcaggcaccagcgcgccctcctcgcaactgaccagcacctcgcggcgcagcggggcgatctcctccaccacctggcgcaccagcacgcccagctccaggcgctggtaggtcagcggcggcgagccctgttccaggcgcgcgtaggtgagcatctcgtcgaccagcttgtcgaggtcctggatatcgttgtccatgccctccaggtacttcaggcgggcgccgtcggtctcggcggtctcgatcatctccaggccgaagcgcaaccgcgccaccggcgtgcgcagctcgtgggacaccgcgcgaaccatctcgcgctgcaccgtcagcagccggtggatgtgctcggccatatggttgaaggccgcgcccaggcgtcccaccgagtcgccaccgcgcacctcgacgcgagtatccaggctgccgcgggcgatccgcgtggcggccgcctccaggctgcgcaggcgctgctccaggcgacgcaccagcaggtaggtgatcaggccgatgaagctcaggcacagcgcgccgagcagcaacagcagctgcggcggataggggttcatctggaacagcgggcccagctccagcacccagggcgtgtcgaggatgccggcgaagatgcggatcgagtcgccgtccttgcccagcgccatcaccgtgtcgccctccaccactcgccggcgctggtcgtcgtcgaggtccagctccttgacctggagcaggtgcaccgggaagccgaagcgcttgtcgcggacgatccgcgcaaggtggtaaggctgttcgctggccgggtagcgcaccagttcgtccatcagcaggtacaccgtggcccgcgccagttgctcgctgacctgctgcacctcgccgctgagcaccaggttctcggcggcgctggcctgggtatagacggtgacggcgtgctcggcggtctgcttcaccagcacctggccgttcatcaggcgcgcgcggctgcgtccgtccatccgcagctcatccagcccgtgcagttgcaggggaatccccagcaagcggctccactgcgccagggcgcgcttgcgctcggtggcggtcatcggttgcaggttgtcggccatcaggcggaaggtgccgcgcgccagttcctcgcggtagtgctcgccgcgcacctcgttgatccagtgcaggccgagcaggcccaggccgctgaccagcagcagggccaggagcatgccgccatagatgcgcaggaagatggatttcatcggcgagcccccggccgctgtccgctgctgttgattctggccgaccgggacgcccgcgccccggcccgcaggaaaaaagcgcctcagccctcgccgacgaacaggtagcccttgctgcgcacggtcttgatcagccgcgggtgcatcgggtcgtcgccgatcttcgggcggatccgcgagatgcgcacgtcgatggagcggtcctggccgtcgtactcgataccgcgcagggcgttgaagatctcctcgcgggagagaatgcgcccggcgttcgccgccagcagccagagcaggtcgaactcggcgctggtcagctcgatggtggtcccgtccagccaggcctcgcgcatcgcgttgtcgatcaccaggcgaccgaacgccaggcgtttgctgtccgccgcctgggcgcccgcttccggcgcctcgctgcgccgcaacagggcacggatgcgcgccagcagcacacgcgggcgcaccggcttgcacacgtagtcgtcggcgcccatctccaggccgagcacctcgtccatgtcgtcggtgcgcgcggtgagcatcaggatcggaccgtcgaactgcggacgcacctggcggcagatggacagaccgtcctcgcccggcagcatcaggtcgagcaccaccaggtccgggcgttcggcgaggatacgcgccgccgccagtgcgccgttggcttcgatgtcgaccttcaggccgttgccttccaggtattcccgggtcagctcggccaggcgtcgatcgtcctcgacgatcaggatgcgccaggcttcttgctccacacagcctcctcgtatcgcggtcccggagccgccgcgcggccccctcagagcggcccgcattgtagccaatacgggggccacgcggcagcacgcgaggaacatcttgcaaacactacatattgtgggtagggtgcgcgccccgaaaggttggggagtaggtctgcgccggtgctttccgagggcgacgaatggcattctccagcgctgccgcggcctacggacgcttcctaggactcacgcacagaagacccacactttatccacaggtttcccccagactgtcaccttgcaaacaccccattagcgcattatcttgtatccccatcgtcgccaccccctatatcttgggtttcgagcgcacgaacggctacaacggaaccaaccgcgcacggaccactctgatggctccggcggctccgcaaaaaagcattttccagacgtactgaaagcatcgacggcgctcaccgcaaggagcccttcatgacgttggaaaagcggtacgggtgttgcaacggacgctgtaaacagacagtcaacaccactaggtattgtgttcgacggcaaaacgccacgaacccgccagggccagggaggcactcacagtccccaccctcagcattcgaatgaagcagccgccgcgaggccggctgcccggctctttatcgattcaagggaatgggcgccccggcgcccgctagcaaaaccattacgagaacgtggagatacccacccatgcataccgacaccacacgcgagaacccgcaggccagcgcgccgcaggccgccgattcgtcgcaggatctggccgccaccgcgccgggccagctacgcgtgatcaagcgcaacggcaccgtagtcccctacaccgatgacaagatcaccgtggccatcaccaaggcgttcctcgccgtggaaggcggcaccgccgccgcctcgtcgcgtatccatgacaccgtgcgccgcctgaccgagcaggtcaccgccaccttcaagcgccgcatgccgtccggcggcaccatccacatcgaagagatccaggaccaggtcgaactggccctgatgcgcgccggcgagcagaaggtcgcccgcgactacgtgatctaccgcgaagcccgcgccgccgagcgcaagaacgccggcgccgccagcgatgtcgcccagccgcacccgagcatccgcatcacccgcgccgacggcagcctgtcgccgctggacatgggccgcctgaacaccatcatcagcgaagcctgcgaaggcctggccgaggtggacggcgcgctgatcgagcgcgagaccctgaagaacctctacgatggcgtcgccgaaaaggacgtcaacaccgccctggtgatgaccgcgcgcaccctggtcgagcgcgagccgaactactcctacgtcaccgcccgcctgctgatggacaccctgcgcgccgaagccctgggcttcctcggcgtggccgagagcgccacccatcacgaaatggccgagctgtacgccaaggccctgccggcctacatcgagaaaggcgccgagttcgagctggtcgatgccaagctgaaggaattcgacctggagaaactgggcaaggccatcgatcacgagcgcgaccagcagttcacctacctcggcctgcagaccctgtacgaccgctacttcatccacaaggacggcatccgcttcgaactgccgcagatcttcttcatgcgcgtggccatgggcctggccatcgaggagaaggaccgcgaggcacgcgccatcgagttctacaacctgctgtcgtccttcgactacatgagttccacccccaccctgttcaacgccggcaccctgcgtccgcagctctccagctgctacctgaccaccgtgccggacgacctgtcgggcatctacggcgccatccacgacaacgccatgctgtcgaaattcgccggcggcctgggcaacgactggaccccggtgcgcgcgctgggctcctacatcaagggcaccaacggcaagtcccagggcgtcgtgcccttcctgaaagtggtcaacgacaccgcggtcgcggtcaaccagggcggcaagcgcaagggcgcggtctgcgcctacctggagacctggcacctggacatcgaggaattcctcgagctgcgcaagaacaccggtgacgaccgtcgtcgtacccacgacatgaacaccgccaactggatccccgacctgttcatgaagcgcgtcttcgacgacggctcctggaccctcttctcgccgtccgacgtccccgacctgcacgacctctacggcaaggccttcgaggagcgctacgagtactacgaggccctggccagctacggcaagctgaagctgcacaaggtcgtccaggccaaggacctgtggcgcaagatgctctccatgctgttcgagaccggccacccgtggctgaccttcaaggacccgtgcaacctgcgcagcccgcagcagcacgtgggcgtggtgcacagctcgaacctctgcaccgagatcaccctgaacaccaacaaggacgagatcgccgtctgcaacctgggctcgatcaacctggtcaaccacatcgtcgacggcaagctggacaccgccaagctggagaagaccgtcaagaccgcggtacgcatgctcgataacgtcatcgacatcaactactactcggtcccgcaggcgcagaactccaacttcaagcaccgtccggtcggcctgggcatcatgggcttccaggacgccctgtacctgcagcacatcccctacggttcggacgcggccatcgccttcgccgaccagtccatggaagccatcagctactacgcgatccaggcttcctgcgacctggccgacgagcgcggcgcctaccagaccttccagggctcgctgtggtcgcaaggcatcctgccgatcgactcggagaagaagctgatcgaagagcgcggcgccaagtacatcgaagtcgacctgtcggaaaccctcgactgggcaccgctgcgcgagcgcgtacagaaaggcatccgcaactcgaacatcatggccatcgcgccgaccgcgaccatcgccaacatcaccggcgtctcgcagtcgatcgagccgacctaccagaacctgtacgtgaagtcgaacctctccggcgagttcaccgtgatcaacccctacctggtgcgcgacctcaaggcccgcggcctgtgggacccggtcatggtcaacgacctgaagtactacgacggttccgtgcagcagatcgagcgcatcccgcaggacctcaaggacctctacgccaccgcgttcgaagtcgagacccgctggatcgtcgaagccgccagccgtcgccagaagtggatcgaccaggcccagtcgctgaacctgtacatcgccggcgcctcgggcaagaagctcgacgtgacctaccgcatggcctggttccgcggcctgaagaccacctactacctccgtgccctggccgccaccagcaccgagaagtccaccatcaacaccggcaagctcaacgccgtgtcggccggtggcaacgacggcctgcaagccgccccggccgccgagccgaagccggcgccggtgccgcaggcatgcagcatcgacaaccccgactgcgaagcctgccagtgatcgcgcgtcgctgaacggcgtccgtgtcgtggccgggtaagccggactcctcccgtgagtccggcttgcccggcgcctgacggtcgctcgtccagcgccacgctggcagcgcaaggcccctcgccagggccaggaacaatccccttcttccctccgggggagaagaacggcccggccagaccgtgccggaccaccgctttcgcgtgcacctcacgccccatatccaggccgccgagacggccgccagaccaggagagagcaagatgctgagctgggacgaattcgacaaagaagacccgaccgaagccaaggccgcgcccgccgccgcccaggccgttgcccagggccatgacaagctggacgacgaagccgccggctcggtggaagaagcgcgcgccgtttccgccgacgactccgacgccgtcgcccgcgccaagaaggccctgaacgacctcgacatccaggaaggcctggacgatctcgaaggctccgccgcgcgcgtgcaggtcggcgacaagcagatgatcaacgcccgcgccgacctcaaccagctcgtccccttcaagtacgactgggcctggcagaagtatctggatggttgcgccaaccactggatgccgcaggaagtcaacatgaacgccgacatcgccctgtggaagagcaaggacggcctcagcgaagacgagcggcgcatcgtcatgcgcaacctcggcttcttctccaccgccgactccctggtcgccaacaacctggtgctggccgtataccgcctgatcaccaaccccgagtgccgccagtacatcctgcgccaggccttcgaagaggcgatccacacccacgcctaccagtactgcatcgagtcgctgggcatggacgagggcgagatcttcaacatgtaccacgagatccccagcgtggcgaagaaggcctcctggggcctgaagtacacccgctcgatctccgacccgatgttccagaccggcaccccggaaaccgaccgccagttcctgcgcaacctgatcgcctactactgcgtgctggaaggcatcttcttctactgcggcttcacccagatcctctccatgggccgccgcaacaagatgaccggcaccgccgagcagttccagtacatcctccgcgacgagtcgatgcacctgaacttcggtatcgacgtgatcaaccagatcaagatcgagaacccgcacctgtgggacgcccagatgaaggacgaggcgacccagatgatcctccagggcacccagctggagatcgaatacgcgcgcgacaccatgccgcgcggggtgctggggatgaacgcggcgatgatggaggactacctgaagttcatcgccaaccggcgcctgacccagatcggcctgaaggaagagtatccggggaccaccaacccgttcccgtggatgtcggagatcatggacctgaagaaggagaagaacttcttcgagacgcgggttatcgagtaccagacgggcggagcactgagctgggattgagattctcgatttaggtcaagaccgttagacgctgtcgccggaaagggatttttgggtccagtgaaaaaatgaaaaaagcctcgccctgtgcggggctttttcttaaataacaatgagaagtattctcgcgatatctattgaatccccaaggcaagctgatgtagaaaggatagcactaggctaccaacataaagcacgactctaggaagctatcgcatagggaagcatatgtctgaatcattgaaacatctcgagctacctgaaacctatgaaaaaataacagctttactaggaggcagtgactctaccaacactcttcttagtagattcatacttcctatacaagatgcggaaaaagagctctctgagataaccgcacagacatacggtgacggaaaagtaatttttatcttaggaaagcctggaataggaaagtctacattcattcactccctagcgtggcgtccaacaatagaagtttgctctgtcacagcaatgaactgttcagaagtagacagcggaaagcttttagaggaaatattagagaatatcagaaaaacttcaaaaaaagcgagagccaatagagatcttggccacacagctatagttctagactatatagaaaaccttgaagaacaagaccatactaagataagagctttttttaggacattgaacggtctcttaagatcttctccaattcttattctgtggccagttaccgatctacacgatgttaaaacgatgattggatatgcatcagcagtatccagcacggtatttgtaaaagggaaagaaatactgagttttagcggcccccctattagcgcctacccaagcattgcaaaaaacacaatatcagtcttaaacgatgggctttccatttcagactttaacttaacggacgaagactttgatgaactcctaaaagagctacgttcagagggagaagacaaaacgactttaagaaactacctattgaaagtacgccagagatggtctgacataaataattatttacaaaagaaaagagagaaagtacctcaacaaacagaaatctggtttgttattgcctatccagatgcagaaaatatagctggtcagttctctagaaaaagcaaagatgtattcgatgcttggattgcctcccatgcaaaactatcggaatacattcacaacaaccaaaaggaggctgcctgggatgccaagcgacttcagtatgcactaaccgggaactttacaaccagaatcctttacctcccagcaaacacactagcctcaacagtctgtgcatacggagagatcccggactttccaccaagcaatgttcctgtaccaacttcttggttcaagaaagaaactgccaggaaaactttaagaaacagcccattagtacgccaactcttaaaccagcatgtaaagatgggaaaaagaagggggggaacggcatctcaagccctcatagatgcagctccggtatataaagttatttcagagcgcgccacaggaaaaagtatatacagcgaccacccctttaacaaagcattaaaaacagcgctacaggatgtactaggaaatcaagttaaaagcatcgattttgagaaagtccatccttggctaccgagcatcagacccgacatccagataaaaactaatgatgaccgaatagtctgtattgagatgcactacacatctaggcaggattcttacattttagcagactacatcctcgaaaaacttgacaaatatatgagacaacttgataggtacatcagaaactctcaactccgcctacctggcctatagttaaagttacaagaaaattactgaaaactctcagcagttactttcgaagaacctttagccacctagcaaggtacgctccgaaactcccggcccccaacgccgccacggtccttcgtggaccgaggcggctttcgaggcctcctgccgctccccccctacacgacgattccgctcggcctcctgatggggcgggccggagcgtcggatatttctctggaagacgtagggcaaatcacgcaaagcgtgattcgcaagatggggcaaagcggctaagcaccggacgacgcggaattggcccaaataccctgtttcatatggcttctttgatagagaaagtctttcaacctcgctcgttcagctcggttgtttcgtccctcttgccgcaataatctgccaccggcgcctaagaaacgcccaactacctagcggccaagccgctcccgacaagcaagcggcttttttgagtctgcggtactctctcgccctcaaaaacctctgtaatgccgggagtggactaataaaaaacccgaaagggaaatatgtccggccctctagctaggtagtagggtttcttagctcccggcgcccagctttcaacgctgttttgccatcagcagaggtaacggaaatgcctatcaccaccctcatatctccacccacatcgcttcaccccagcacttccccggaggtgcgccatgtctgacgccctcctccactacagccgtttcacccaccaccatcgggtcctgcgcgccgtgctgctggatgaggaaggctggttcgtgctctccgacctggtacggctgctgggccgttacctgggcggtcgggcgccggcggcgttgtgtgacgaggcgccgtggccgctggcgacggcggaacagcgcgagcgcttgttcgccctctgccatgcgctggagcggcatctggacaccgatcagtggcggctcgcctggctccatgacgaacgccacgggccacgccaggactgcctggtcagcgagtccgggctctacgctctgctctggctcgcagcgcctggcgcggcacggggtttgcgccgttgggtcagcggctcggtgctgccacgcctgcgcagccagtcccgccccaacgccacgccccagcgcgccgtgctgcactggaaaaccgccgagatcgacaccctgcactggcaaggcaagacatggatccccctctgcgactgcccccaactcctcgacagcccacgcccgctgatccgggcctgaccccgccacatgccctgaaaggagtcagggcttgaagcagcggagtgacctgcttttacatgactacttgtcgtggcctgcaatcagcaccggcctgtaatccatcgcggccaaccagaattatctgcgactgacggataggctgggctcagattaattgcaagtttgcaatccattcgacgggctcgtgctctttgcgactgacgctcatactggtaatccggcactttgcatcttttcctgcaactcggtcgctcgcgccgagtccagcgtattgctgaacaacgcactaacctccgtaggcctggcatcgaactgctctaccaggcttttatggtttatcttgctagtagtcgacgcgcttctgcatctcgagacgggaagccactctctacgagaagacagaagcccctcacagaggcctctgtctacacctactaaagttcggcttattatatgtatttatattctttcaatagatcactcagcgctattttaagctcaccctctgtaagttcaccttggcgctctttctttccttcggtaaagctgtcggccagaccaaacattaaactcaagcatctcccaagcgatgcatcatcttgggccagcacccctgaatcgcgctcggacctccaagtcttaaaaaattcttcgctgaaggttttcccgtcaatcgatgaggctaatagcctctttgcaatatctatcatttccatgctcatcttaaagcacctcatttttcatgtaaaaattgtattgatccgtgccaggttcaatcctccacccagaaacaaacatcccatcctctccaatgataacaacaatattagtcctggcattgtaatgtacttttgagtttacttcggagtggtaagtccctttttctacggttgcaggatcggcaaggtgctcaagaattttatccctaaactctgcaagcgttccattgttggcgcttttttcacccagcccaaaatcatatttgtggctatcaaattttttctgtagttgcctccgtgtgaagataccactatcaagaggactactgagcattacataaacaggtttgactccagaatccgccgggaaaatcacgatcagatcgtttaggtccagtagcattcccggataggactccgggccggtcttcaacggtgtgagggccgctccctcatataccggcaccggcttcggtatgaccggagtggtactcgaagggttctggtttcctggaggactcgccggcgtccaagtcaggatcagtggcggcgcttctgcggtcgtagagggaaccgtaacctcgtacaggcctgtcgtggcattgtaggccgccatccggaccggaacggctttcggaacgctcacaccatcggtgctgaccaccgaaagggtcgtcgtgttgcctcgtgcctcgttggtcagtcgcatcggcagatcgacggtaccacctgcttttgcaaccgcgctcagatttacgcttgaggtaagccccagcttgttggcatccatgcccagggcgtaacgaacgctatcgggcgtttggtcctgccattgctcggcagtccgggaggagtaggtcagactggcaaagcccacggccatcaccgagggtgctgaagccaggacccggcccaggacggcaatcgcatcggagatcgcttgagcaagggatgcggcgccttgtgcgacctggatcagaccccggcctgcggcggtggcgacaacgctgccattggctggcatggcataagtattggcagccctgatcgccgcttgacgagcgatttccttgcgccttgccgtttcggcgttcagcttgtccagccgggcttgcaggctggcgatttcatccaccaggagatcggcgttgtaggttgccttttgtttctccagtgcattgggtgccttggcaatcaaggcattgtttgcagtctgcaatttcttcttattggcgatcgcctgcgtaaccagttgagtagcgcgttcaagccactgctctggcgttggattggtcagttgaggcaaagcattcccagcctggtcaagctcggactgcacttttttctcgacatttgccttcctggccttgtagtccgcctccacctcagcagcggctcgctgggcttctgcttccaatgaccgggctttattctccagctcttgagacgtttgtttcaagatagcgatttgcgccttatagatatcggcgctgtacgctttggccagctcactcatatggcgatccaggaactctccatagaattttcggctggccagcaactgactctggtacatcgactctgacttctgaggaaagtctgaagccgtataaagattggccgggcgatcctcaatggcctttagcgattttgctttggcatccatgagtgcatcaacgatactcttttcatcgcggatgtcattggcactgaccgctttacctggcaaccccgcttcactcttgagttcatcaacctccttcagggtttcatttttcaggtttttcttgagttctgaatgggacttatcaagcgtacttcttagcttcctgtactcctgcattccagtaccgacatacggacttggtcctggtgggacaaatggtggagtaccgtagcttgatcgagcaggaatatactggattatgtcacgcccaccaccctgcacatgtgtaataaccatcgaaccaggttcgtaatcattgacagccatagatcgcccctacattaatttgaaagtgtaatgtattgagcgactcccacctagagaaccctctcccagtcaataagccccaatgcatcggcaatacactgcaatcaacttcaatatcccgtgtttagatgatccagaaggtgcgctctctcgcctcttataatcgcgcctgcgtcaaacggtcatttcctgaacgcacacctcatctaccccggccagtcacggaagccgcataccttcagttcattaacgaactcccactttcaaaattcatccatgccgccccttcgcgagcttccggacaaaaccaccctgattgcgagcccagcgtttttgattgcaagccgctgcagctggtcaggccgtttccgcagcgcatgaagtcctggccgatctaccggcagggccagccatcgttcgacgaataaagccacctcagccatgatgccctttccatccccagcggaaccccgacatggacgccaaagccctgctcctcggcagcctctgcctggccgccccattcgccgacgcggcgacgctcgacaatgccctctccgcctgcctcgccgcccggctcggtgcaccgcacacggcggagggccagttgcacctgccactcacccttgaggcccggcgctccaccggcgaatgcggctgtacctcagcgctggtgcgatatcggctgctggccatgcatgccaatgcgaaggcacaggtccttcaggaaggtctgctcgacggtcgctacgaaggcgcccgtaccctaacgctggcagcggatgcgcaactggcggccgacagcacgctcgtggtacgtcttggttgcgccgtcgccgaatgaccatccaccgacccagcgaggttcgcgatgcacctgctttacccctccgcccccgaccgcagcaacgcggtcgatgaactcttcgccgaggaatatgacgcggcccgttcggcaggcttggcctgttcgctgttctgcgacgaggaactggaaagtggacgcttccgcgcccgcccggagtttccggcaaacacccaggtgctgtatcgcggctggatgctcacaccggaaaactacgctcgcctgcacggcgcgatcctcgtcgctggcggacggcccctgaccagtccacagcaatatcggcactgccattacttgccggagtggtatccgctctgtgaggacctcacgccggcgaccctgttcctgtccaggaacgccgacttcgaggcagtgttggcgcaaagcccgtggcgcgcctggttcgtcaaggaccatgtgaaatccctgaccacccagcgcggctcgaaggccaccaatgctgcggaagtgcgggaagtcctcgattcgatcgagcgttatcgaggcaccatcgaaggcggtgtatgccttcgggagttcgaggcgctgcgtgcggaaaccgaggaacgctacttcgttcttcacggccgcgctcacgggcgtctcgatgccgtcccgccgctagtggaacaggtggcacaacgtatcgattgcccgttcttttccgtcgacgtggtcgagtcgaccagtggcgagttgcgcctgatggaactcggcgatggccaggtctccgaccgcaagcaatggcccgccgcacgcttcgcggcgatgctggcacaggcatagtcggaaccgctgcaatcccaacccgaccaagctccccttgatcgatcctgaggggggctcgtcactcgcgcagtgcctcgaccacttactctcatccaaagcccaggaacggttgtccgtcccctcgcccatggatatttcttccactctgcaatccagttcataaatcccataaaagccctcttccgctccccgccagcctccccgcatcccgcaccctagacgccccgccgctctccgccggcccgcccgacaagaaaaaccaaccgctcgatcagcctcatccttcacccatcacaggagccatcgcgatgcacctgataccccattggatccccctggtcgccagcctcggcctgctcgccggcggctcgtccgcgtccgccgccgaggaagccttcgatctctggaacgaatgcgccaaagcctgcgtgctcgacctcaaggacggcgtgcgttccagccgcatgagcgtcgacccggccatcgccgacaccaacggccagggcgtgctgcactactccatggtcctggagggcggcaacgacgcgctcaagctggccatcgacaacgccctcagcatcaccagcgacggcctgaccatccgcctcgaaggcggcgtcgagccgaacaagccggtgcgctacagctacacgcgccaggcgcgcggcagttggtcgctgaactggctggtaccgatcggccacgagaagccctcgaacatcaaggtgttcatccacgaactgaacgccggtaaccagctcagccacatgtcgccgatctacaccatcgagatgggcgacgagttgctggcgaagctggcgcgcgatgccaccttcttcgtcagggcgcacgagagcaacgagatgcagccgacgctcgccatcagccatgccggggtcagcgtggtcatggcccagacccagccgcgccgggaaaagcgctggagcgaatgggccagcggcaaggtgttgtgcctgctcgacccgctggacggggtctacaactacctcgcccagcaacgctgcaacctcgacgatacctgggaaggcaagatctaccgggtgctcgccggcaacccggcgaagcatgacctggacatcaagcccacggtcatcagtcatcgcctgcacttccccgagggcggcagcctggccgcgctgaccgcgcaccaggcttgccacctgccgctggagactttcacccgtcatcgccagccgcgcggctgggaacaactggagcagtgcggctatccggtgcagcggctggtcgccctctacctggcagcgcgactgtcgtggaaccaggtcgaccaggtgatccgcaacgccctggccagccccggcagcggcggcgacctgggcgaagcgatccgcgagcagccggagcagacccgtctggccctgaccctggccgccgccgagaacgagcgcttcgtccggcagggcaccggcaacgacgaggccggcgcggccagcgccgacgtggtgagcctgacctgcccggtcgccgccggtgaatgcgcgggcccggcggacagcggcgacgccctgctggagcgcaactatcccactggcgcggagttcctcggcgacggtggcgacgtcagcttcagcacccgcggcacgcagaactggacggtggagcggctgctccaggcgcaccgccaactggaggagcgcggctatgtgttcgtcggctaccacggcaccttcctcgaagcggcgcaaagcatcgtcttcggcggggtgcgcgcgcgcagccaggacctcgacgcgatctggcgcggtttctatatcgccggcgatccggcgctggcctacggctacgcccaggaccaggaacccgacgcgcgcggccggatccgcaacggtgccctgctgcgggtctatgtgccgcgctcgagtctgccgggcttctaccgcaccggcctgaccctggccgcgccggaggcggcgggcgaggtcgaacggctgatcggccatccgctgccgctgcgcctggacgccatcaccggccccgaggaggaaggcgggcgcctggagaccattctcggctggccgctggccgagcgcaccgtggtgattccctcggcgatccccaccgacccgcgcaacgtcggcggcgacctcgacccgtccagcatccccgacaaggaacaggcgatcagcgccctgccggactacgccagccagcccggcaaaccgccgcgcgaggacctgaagtaactgccgcgaccggccggctcccttcgcaggagccggccttctcggggcctggccatacatcaggttttcctgatgccagcccaatcgaatatgaattcatcctgataggtaatccgcctaacctgcgtctgccacgctttcgctcgtcccggaagcggccataacaattccaatagccgacgaggactctccatgctcacccatcgcatcggtggcatccgcctttccccttccccgcagcgctcgcccggagaccgccatgactgatctccgcgatgcctcccgcgacgaacgcctgctggcggcccacggctatcgccaggaactggagcgcgggctgagcctgtggtcgtccttttccgtcggcttcgccaccatctcgccggtggtgggcatctactcggtgatgtccctcggcgccatgagcatgggcccctcctgggtctgggtggtgccgctgtgcctgctgctgcagttcggcgtggcgctggtctacgccgagctgtcctcgcagtttccgctggccggcggctgctaccagtgggtgcggcgcctggtgggcgaccgcctggcctggttcaccggcttcctctacctggcttcggcgctggcctcgctgactaccgtggcctacctcggtggcttctggctcggcctgctggcgaccggcgcgccgccgtcggccaacggccaggtgctctgcggcgcgctgctgctggcgctgggactggcggtgaacctgctggggatcaacccgttgaagtacttcgtcaatgccgggatcgtcgccgaggccatcgcctccatcggtatcggcgtgctgttgctgctgttcttccgcaaccatccgctcgatctgctgttcagcggcccgggcggcacaggcgatgcggacggttcctacctggacggcgtgctgaccgcgctggcggtgggcggctgggctttcctcggcttcgacgcctgctcgcagatttccgaggaaaccaccgatgcccgcgtctccactccccgggcgatcctgcgctcgatgctggtggtgggattcaccgtgatgctcaccgccttcgccgtgaccctgtcctaccaggacatcggcgcggtggtcagcggccaggtggtcgacccggtcaccccggcggtggtggacgccttcggcgcctgggccgagcggcccttcgtcgcagtggtgctgatcgccttcgtcgcctgcgtggtgtcggtgcagacctacatcggccgggcgatcttcggcatggcgcgcgacgccatcctgcccggctccgccctgctgcgccgggtcgaccggcgcaaggtgccgatggcggcgatggtctgcagcacgctgctggccagcctcggcctggccctggggctgaacgccacggcggtcggcacgctgatcgcgttcggcagcggcggtttcttcgtggtcttcctgatcgtcgccgcctgcgctctctgggcccgcctcgtcggccgctgggacccggacaagggcgccttgcgcctgggacgcgcggggctggcggtgaacgtcctggcagtcgcctggctgtcgttcgaggcgctcaacgtcgcctggccgcgggccagcctcgccccgcccgacgcgccctggttccaggtctgggcggtggtcgtggtgttctccgcgctggccgcgttcggcctgctctacatggtcatcgccaagccgcatcggcgcatcgccaccagcctcagcttcgccgctccgccggcggactgacccgcacgcgccggccgttccggcgcctcctccggttgttcccgcacgctggcttcgcgcccggcggggcccggatcatcctgctttcacggagcatcgccatgagcgacctgcattactggaactaccccaccgatatcctctgcggcgtcggcgccctggaacaactgccgaggcgttgcgcgctggcgggcgcacgccggcccctgctggtcaccgatcccggcatgctcgccctggagcccctgcgcctggtgcgcgagtgcctggaacgcgccggcatcgaccatgacctgttccacgaactgtcgagcaaccccagcctcgctgaagtccacggcggcgccaggcgcttcgaggctggcgggcatgacgcgctgatcgccctcggcggcggcagcgccctcgacgcggccaagggaatcgccctgctcagccgcgatccgcacggcctcgaacgcttcgaatggacccagacgctgcgcagctatccgaccctcgccgactacccgctgctcggcctgccgccgctgctggcgctgcccacgaccgccggcaccggctcggaactgggacgcgaggcggtgctgaccgacacgcaactgggcatcaagcgggtcgtcggccatcgcgagctgctggccgcctgcgtattcctcgacccgcgcctgacccgcgggttgccgccggcgctgagcgccgccaccggcatggacgccctcacccatcacctggaggcgctgttctcgccgctctaccatccgatgtcggcgggcatcgccctggaaggcgtgcgcctggtcaggcagcacctggaaaacgccgtgcgcgacggcaacgacctcgccgcccgggaaggcatgctggtagcctcggccagcgccgcagtggcattccagaaggggcttggcggggtccacgccctggcccacccgctgggcgctcgccatcacctgcaccacggcctgctgaacgccgtgctgctgccctacgttctgctggccaaccgcccggcgatagaagccgacgccgcgcgcctggcgcgctacctggaactcgacgaagcgagcttcgacggcctgctggcgtggatcctcgaactgcgcgcgcgcatcggcatcccggcgaacctcgccgccctcggcctggatggcgaggacgcgcaatgggtgggcgagcaggcgctggccgacctgtcgtcctcggcgaccaacgccctgccgctcgatgcccgggattatgcgcgcatctaccgccaggcggtggccgggactctcgcctgagcgctcaggaccccaggccgtggacctgcagcaggtcgtcgatgaaggcgcgggcggcttcgctgagggggcgcccggcatagacgatcatgctgtgctccaccgggtagctcagccgctccggcaacagcgcgcgcatccgcccacgctcgatccaggcttcggcgtaatgggtcggcaggtagcccaggtgggtgccggccagcacggcatgggcgaccgcttccatgtggtaggcggtggcgcggctgcgcgacgggcgtagcggcaggaccaggttttccggcaggaagccatgcatcacccagtcacaggcggcgatccgctccagggtcggctgcgcctcggcgaacagcggatggcgatcgccacagaacacgccgatctcttcgcgatacagcgggcggtattcgaggctcggccgcaaacggctgaaataggaaatcgccagatccagctcgccttcgatcaccgccagttccagctcggtgggcgaattgacgaaaaggttcagttggacatcctggtcgcgccgctggaagcgcgccagcgcatcgccgaaacgggcctggggcaaggtcgcgagattgtccgccaggcccaggtacagctccccgaccaaacgtccggacaacgcctgcgcctggtcgcgaaacaggccgatggcgtcgaacatcgttcgcgaagcctccagcacccggcgacccttggcggtcagtcggaagccgcccttgccgcgctcgcagagccggtagccgaggcgcttctccaggctggcgatgtgcatgctgatgttcgactggctcatgttcagctcggcctgggccgcggtgaaaccgccgcacttcaccacgcaggcgaagatgcgcaacagacgcaggtctaggtcggtgacgtttctcagcatggcggtccgatccggcgcgaggtcccgcagtctagccgagcgccgcgacacgcggccatccagcggcggcgcacggcgcaccagaggcgctggcgtatcatcaaaaatctggtctattccaatttcttgaaaatacgtagaaaagtcccgcccaaaggtgccgccaggacaagaaaatgcaccaatcccaggcaatccctcgaaaaaatcgaatcgtttcgccctgcttttggtctagaccataaaaatacccagtgctagattgaccttcgccagccggcccagcctgaccggatcggcgccacgcaccgccaccaagccttcaaaatccatctcagcctcggcaggaccgagcaggagcgcgtcgacagccaaccttgcgcacgaaaaaagccatgggaaaggcatctggcctagaccatgcatccggacagctttgcagcagcacaacaagaacaacctccccgcactgtctagacccatagggacccacatgaacaaccacaacggtaccctgcaccgtggctggcaatcgctccagcgctggcgcatccagatcttcgtcatcacctggctggcctacgccgccttctacttcacccgcaaggccttctcggtggccaagctcggcatcgccgaagacccttccttcgaactcgacaagagcgccatggccgatctcgatgccctctacctggccgcctacgccgtgggccagttcatgtggggggtgttcgccgaccgcttcggcacccgcgtggtggtgctcggcggtttgctcacctcggcgctggcggcgctggcgatgggtaccttcgccaccctgccgatcttcgccgcctgcatggtggtccagggcctggcgcagtccaccggctggtcggggctgtgcaagaacatcggcgccttcttcgccacctacgagcgaggccgagtgctcggcctgtggagtacctgctacgccttcggcgggctggtggcgacgccgttcgccggctggtgcgcctaccggttgacgcatgactggcgcatggccttcctgtcctcggcgggagtggtgctggcggtggccgtgctgttcttcttcctccagcgcaaccgtccgcaggacgtcggcctgccgcccgtggaggccgaggccgcgccccccgccaacgcgccccggccgagccattccggcgccctgctgaaggcgctcaggaatccccacgtgctggtcctcggcatcgcctacttcctgctcaagccggcgcgctacgcgatcctgctctggggcccggtgatcatctacgaacgcatgccggagatcggcaaggtcgcctcggccatcgtgccttcggccttcgaggtcgccgggctggccgggccgatcctcatcggcctggcctcggacaagctgttcggcgcccgccgcatgccggcctgcgtgctcagcctggcggcgctgaccctgagcctggcgctgttcgtcccggcgatgcagagcggcagcctgtacctggtggtcggcctgctgttcatgatgggcgtcaccctctacgggccggactcgatgatcagcggcgccgccgccatcgacttcggcaccagcgaagcagccggtaccgccaccggcttcgtcaacggctgcggctcggtcggggcgatcctcggcggcctgctgccgggctacttcgacaccctcacggtgttcttcgtgttcaccgccaccgcgctgctcgccagcctgctgctggtgccgttctggaacagccggccaggcgcgtgccgcgtcgaaccgaaggcgcatgccggcgggccgctgctggcggccggcaagccgcgttgaaacctcgccgaaccaccgcccggcgccaggcgcgccgggccaatccctagcgaacaaggaaccgcctatgccacttgccctcttcgacctcgacgacaccctgatcgacggcgactgcgcgaccctctgggggcgctacatgaccgaactgggctgggtcgagaaaaccgccttcctgcaccaggaacgccgcctcatggaactctatgccgagggccggctggccatggaggactacatggacttcagcctggcgcccatcgccggccgcaccccggcggaaatcgccggcgccgtcgaggatttcgtcgcgcggatcgttgcgccgcgcatccacgccgacgccgtgcgctgcctggaacgccaccgccaggccggcgaccgcctgctgatcatctccgcctcggcgcacttcctggtcagcgccatcggccgccggctgggggtggacgaggtgctggcgatcgacatcgaggagcgcgacggcctctacaccgggcgcacccgcggcaccctcacctaccgcgagggcaaggtccgtcgcctcgacgcctggctggcccaggagggcgagacgctggccggcgcgaccttctattccgactcgcgcaacgacctgccgctgctctcgcgggtcgaccggccgcacacggtgaaccccgacccggcgctgctcgggcacgcccgcgaggccggctggccagtgctggaatggcgctgagaaggcgcgccgcgctataccgccggcggcccggaagcattaccctgtagccccccggagccccagcggagaagcgtcgatatgcgcgacgagccgtcccgccccctgacggtgatctaccagtccctgcgcgagcagatcgagcgcggcctgctcgcgcgcggcagcaagctgcccagcgaacggcagttgagcgagctgttctcgaccacccgcatcaccctgcgcgaggcgctcggccagttggaggaccagggcctgatctaccgcgaggaacgccgcggctggttcgtctcgccgcagcggctgctgtacaacccgctggtgcgcagccacttccacgcgatggtcgccgaccagggccgggtgccggagaccgaggtgctcggcgcggcgatgatcccggccagcgtcgacatctgccagcgcctggagctgccggcgctgtcgcgggtgttccagatccgccgggcgcggcgggtcgacgggcggctggtgctgtacgtcgagcactacctgaatcccgcctactttcccggcatcgagcgcttcgacctgactcgctcgctgaccgatctctacgccaaccactacggcatccgctacggccgggtgcgcttcgaaatggtcccgaccatcctcccggcggaggccgcgggaccgctgcgggtctcggtgggcagcccggcgctacagatcgtgcggatcaaccgcgaccaggcgggccgcctgatcgactgcgacctggagtactggcgccacgacgcgctgcaggtcaacgtcgaggtgcccgagtagcgctcctcgacagcctcaaggttggccaacgaccaaggattggacgaatcagccaggcgcgcgatggcagactgcggtgcagacaagcagaagacggcatcccagccacacaagggattccccgtacgcctgccccctattcgatctcatcaagcgctcccacagcctgaccggtcagccgttcgtcccaaaaccccggccactacgtcaccgtgcactacagacatcatgctaccgagcactgccagcgccacatcgcttcctcaacctggttaccctgatcggcaagccgaaggcgcggctgtttaccacccgcacctaatacgcagcagcgcccgggcccccgacgacctgctggtcggcacgctgccggcactctggagcattccggggctacagcgtcgcccgcgactacgggctcggagccgacgacagcctcctgcgctaaagaacggcgaccagctctccggaatagtcggtcctgtacatgaatagcttcgtcataccagcgcccagcccgttcgtccgtgccgacagcttcagcccctgcatgacgtgccactatattgccggtattatccatggcagattccccccacgcatggagacgatatggacctatatggaattgttggcgcaggtgggttcgggcgtgaagtcattccattggcaaacaagaaccttcgcatggtcagccagggcaatttccgcttggtattcatcgatgatggcgatgtggcaaagaacgtaaacggctacgacgtactcaccaccgagaaattcctggcgcagaaggcgggcgaacgattcttcaatatcgccatcggcaatagcaggatccgcgagaaggtatgcaacatcctgctggatggtggcgccagacccttctcgatctcggcatcgaacgcagtcgtcctggacggcaacgaacttgccgaaggcagcatactctgcccattctccatggtgacctcgaacaccaggatcggaaagttcttccatgcgaatatctattcttatgtggcacacgattgtgagataggcgacttcgtgaccttcgccccttccgtgaaatgcaacggcaacgtcaggatagaaagtcacgcctacatcgggacgggggcggtcatcaagcagggaacgccggagcatccaatagtgatcggcgaaggtgccgtggtgggaatgggagctgtggttacgaaaagcgtaccggcaggtgccgtggtggttggcaatccggcgaagccgctggtgcgcaaggaagtggcggggtaagccaggtcgaggggcagtcttcctacccttagctgggcacctgaccagcaggatgcgagaacctgcccaccagaccggcctgaatagccaccaacatctgttctcaacgtacttcctggaactgctctatcggtggattgcggcgaacagcgacgacctgttaaaagcggggtattcatttgaaaacccgatattgctatgagcgacagtgaaaaatcgaatagccgcctgttcgacctcgacctgctccgcgccatcgtcacggtggccgactgcggcagcttcaccactgccgccgcgcgcctgcactcgacccagtcgaccgtcagccagaaggttcgccgcctggaggaaatggccggacaccgcctgctggagcgcggcaaccgcgacgtgttgccgaccgacgccggcgatacgctgctcggctacgcccgtcgcctgctggcgctgaacgacgaactggccgaggcgctgtccggcgccacggtggcgctgacggtgcgcatcggcgtgccggacgacttcgccgccggccgcaccaccgagcgactggcggccttcaaccggcgttatccacaggtcaagctggaagtcaccagcggcatgagccgcgacctcagcgccagctacgaccgcggcgaactggacctggtgctgctcaagcagcgccgcgccagccgcgaggcactggcctgctggccggaaaagacatgctgggtggacagcgccaggaacccctgcatcgacctcgacccgctgcccatcgtcaccttcccgccgcgcggggtctaccgcgacgagatgatcgccgccctggaagcggtcggccggcgctggcacatcagcttcaccagttccagcctcagcggcctgcaatcggccatcgccgacggcatgggcatcggcctgctgccgctgcgcgcggtgagcgcaggccatgcggtgctgccgaagaacgccgggctgccggcggtggacgtgttcgaagtggcgctgctgcaccggccggcggcggatccgatggtgaaggcgctggcgcgcgtgctgtcgcgggtgctggcggaagatacccggagccggcccgcattcgaaaaatgaatatactggattccaacatttaatttgtgcatgcgccaggcgctggatatcgttgccgtcagcaacggctcgcgcccgcccgtttcgctccggcggcgcgtgagccggcagcaagacaacaacgaggaaacgctccatgtccaagtccagctactacgcgccgcacggcgggcacccggcacagaccgagctgctcaccgaccgggcgatgttcaccgaagcctatgccgtgattcccaagggggtgatgcgcgatatcgtcaccagccacctgccgttctgggacaacatgcgcatgtgggtgatcgcccgcccgctgtccggcttcgccgagaccttctcgcagtacatcatcgaactggcgcccaacggtggcagcgacaaaccggagcaggatcccaacgccgaggccgtgctgttcgtcgtcgaaggcgagctgagcctgaccctgcagggccaggtccacgccatgcagccgggcggctacgccttcattccgccgggcgccgactacaaggtgcgcaataccaccggccagcacacccgcttccactggatccgcaagcactaccagaaggtcgacggcgtaccgctgccggaagccttcgtcaccaacgagcaggacatccagccgctggtgatgccggacaccgaaggccgctggagcaccacccgcttcgtcgacatgagcgacatgcgccacgacatgcacgtcaacatcgtcaacttcgaaccgggcggcgtgatccccttcgccgagacccacgtgatggagcacggcctgtacgtgctggaaggcaaggcggtgtaccgcctgaaccaggactgggtcgaggtggaggccggcgacttcatgtggctgcgcgccttctgcccgcaggcctgctattcgggcggcccggggcgcttccgctacctgctgtacaaggatgtcaaccggcacatgcgcctgaccctcaatgcgccgcattgagggcgggacaggctgaaagggaacccggcgccatggcgccgggtttttcgtttgcggaaggcgcccagcccgtcgtcagttccgggcgcggaggacttcagggcgaaccgaacatggccgtccagtagattcccgcgtcgctcttcggatcggtggcgtaggccgcgcccagctcgcggtagccggggttcatcaggttggcgcagtggcccgggctggccagccagccgtcgaccaccttgtccaccccgtcctggccggcggcgatgttttcgccgatcagcccgccgctgtagccggccagctcggcgcggtcgccgggggtgcggccgtcgcggtcgaggtggtcgaagaagttgccgttggccatcgcccgcgaatgcgcttcggcggcgccgccaagggtggcgttccaggccagcggctgggccgctgcgtagggcttgccaccgcactggagggcttgcccgcgggcggcgttgatccgttccaggagcttctgcccttccgcctgccaatcgcccatgccgccgcgcagcaatggccgggcgaggacgatgcgccagtcgcggtcctggcggctgacgccgacgtcgacgaattgcgggtcgagcaccacgcggcagaagctttcctgcagcgccttcatcgccgcgccggcatcgcgcggcccggaaaggctgatcgactgcacgttgaccatcgggtaggcggcctgcgccatcgcctgctgcaggtcgccggcggcattcaccggcaaggccaggcgcggatcggcggccagcggcggcagttcgccgctggcctgcccgccgcaggactgcacctggccacggtaggcgttgatcgcctcgaccagttgcgcctcgtcggcggcactggcggccgctgcgagcgccagtccgagcgtcagtacggccaaacgcgggatgcttgggattgccatggaaatctcctcgatctgatggcgcctatgatgcgcgattccgcggcgcgccgccgcattcgaccggaacccggcgccggcgttgcaggctcaggccggcgcttcggcgaacgcctccaccagccgctcgatcaccgcgcggacccgcgcggtgtggcgcaggtccttgtgggtaaccatccacacctcgtatggccggcgtcgctcacgctgcggccagacccgcaccagtccgtcgcgctcgcccatgtacagcggcagctcgcagagccccaggccacgcgccagggcctggcgcaccatcatgttggaattcaccgcgatgaccacccggccgtcgcggatcggctcgccgcccagggtcagttcgcgctggctgtgccaatagggttcgtacatcaccaggtcgtggccgcggaaacgctcgccgggcaccggcacgccgttacgtcgcaggtagtccgcggaagcgaacaggcccatgggccaactggcgagttttctcaggatcaaatcgggattttccggccgcagggtacgaatcgcgatgtcggtctcgcgcttgggcaggtcgaccacggccgaagcgctgtcgagcagcacgcggatatccgggtgttcaaggtgcaggcgggccagggcgggtagcacgaagtcgacggccagggagtcggtggtggacaaccgcacctcgccggacagtcggtggtccatcccgcgggtccgccgcagcaactccagggccgagcgttccatcttctcggccagttcgaaggccgcctcgccggccggggtcagcaggtagccggacgaggtgcgcaggaacagggtcgagcccagcgccgcctccagcgacgccagccgccggcccaccgtggcctggtcgacgtgaagcgcgcgggcggcgccgcgcagggtgtgctcgcggcagagcgcgaggaagacgcgggtgtcgtcccaattcatggcggttttcctgatgcattttcgcatcagtctaatgaaaaagcgctgcgcgaccacggcatccgcgctgattaccatgcgaaccaggtccgaaccattttcccaggagcatgcgatgagcagcacgaaccgatttcccgaacgaatgaccgccatcgagatcgcccggcccggcggccccgaggtactggtggcgaccagccggccgctgccgacgcccggcccgcgcgaggttctggtcgaagtccgcgccgccggcgtcaatggccccgacgtgcttcagcgcaagggcgtgtacgacccgccgcccggcgcctcggacattcccggcctggaaatcgccggcacggtgcgggcggtcggcagcgaggtcagccgcttcgccgtcggcgaggcggtgatggcgttgattcccggcggcggctacgcgcagttcgcggtggccgacgagcgcaccaccctgcacctgcccgacggcctgggcatggaggaagcggcggcgctgccggaaaccttcatgaccgtctgggtcaacctgttccagcgcggtggcttcaaggccggcgagacgctgctggtccacggtggcgcctccggcatcggcaccgccgcgaccatgctgggcaaggccttcggcgcggcgaaaatctttaccacgatctccagcgaggcccagcgcgaggccagcctgcgcctcggcgctgacctggcgatcaactacaccgagcaggatttcgtcgaggaagtgctgcgcggcaccgaaggtcgcggggtcgatgtgatcgtcgatatcgttgccggcgactatgtgacgcggaactaccaggcggcggcgatgaacggacggatcgtgcagatcggcgtgatcaagggcaaggccgccgaagtcgacctgttcccgatgctgagcaagcgcctggtccatcttggctcgaccctgcgctcgcggagccacgacgagaaaggcgcgatcatcgccgaactggagcgccaggtctggccgcacgtgcgcgccggcactgtccggccgcaggtgttccgcaccttccccctggaacaggcgcgccaggcccacgaactgatggactccggccagcacatcggcaagatcgtcctcacgtcagctccctgaggccgctcagacctcgatatcgcccaggcgcagcgcccgcgccaccgcctgggcggtggacgccgcgccgagacggcggcgggcggcacgcaggtgattctccacggtgcgctcggaaatcatcaggatcgccgccacctccgcctgctgcttgcccagggcgatccattgcaggacttcccgctcgcgctcgctgagcgcttgcgcatcgcccgacgacacagggccgcgcaggcgcttcagggcgaagaacaggatcgggcagaaggcctgggcggcgagcttgcaaccggcattcaggtccagccgctcgccggcaaaagacaccgcgccctccaggccattgcggccgaacaccggcacctgcatgccattgacctggccgaggtcgcggaccccacggacgatgcggtaggccatgcgcgccggatcctccgaggggctcttcgaccagaagaacggctcgtccagttcgaggatgtgccgggtgaccgggcagtgcagaagataggcatcgcgctcctgggcgctgcgcccctcggcccagtcgccatggacgaagaacagctcgtcgatcagttcgtcctcgccggggcgggggaacaggctgcagacgatcacccggtcgaagcccaggcgtacggcgaactccaccatctcgcggcagaccgcctcggtggtagcggccttacgcagccgggcgacgctgtcgaagagaaggctggcgtagtcggtcatggagcggacgttcctggcttttcccgcatgatccccggcttgccggcaaaagcccataggggaaaaccctcaggcgaccgatcgtgggttaggggatttcccctatttcgccggccggcgaccccgcctatcgtcttggtgcgacctccatcacgcagaaaggaacgagccatgagcaacgagcgcgataccagcagaaccccgacgcccgaccacgccgagcacaacgcgttctttccctcgccctattccctgagccagtacacctcggcgaagaccgacttcgacggcgccgactacccgaccccgtacaacggcggcaagaaggtgctgatgatcggtaccgacgaacgctacatcctgatgcagaacggcagcatgttctccaccggcaaccacccggtggaaatgctcctgccgatgtaccacctggacaaggccggcttcgagttcgatgtcgccacgctctccggcaacccggtgaagctggagatgtgggcgatgcccggcgaggacgaggcggtgaagagcatctacgcgaagtacctgcccaagctgaaagcgccgcagaagctcgccgacctcctggagcaggccgtcgccgacgactcgccgtacgccgcggtgttcgttcccggcggccacggcgtgctggcgggcattccgcacagccgggaggtgaaacggctgctcaatgccttcctcgccaaggaccgctacatcatcaccctttgccacggtccggcctgcctgctggcaccggcggtcgacgagaagccggaggactacccgttcaagggctacgagatctgcgtgttccccgacgccctggacaccggtgccaacctggagatcggctacatgcccggtcccctgccctggctggtgggcgagaacctgcagaagctcggggtgaagatcctcaacaagggcatcaccggccaggtccaccgcgaccgcaagctgctcaccggcgacagcccgctggcctccaacaaccttggcaagctggccgccaagacccttctcgaagcgttcgcccgctgattccccgccgcgccccgtccgtgccccacggacggggacatctcccgttcgtcccggcgtcatcgaacttaaaccggcctggcgcagcatcgtccttcaggaagaggaatggcgcgttgcccggcgccgtccggcgaaagacgaatcgatgaccgcacagaaagaaaactctgacagcacaccgactagtcgtcctcccttcccgccgttacggttccgggcttgcgcacaaagccgaacccaagggggcccctcatgtcactgccgccgtacctcaagcccggcgacaaggtcgtgttgtacgaccagcactgccgcttctgcacgctctggagcggtttcctggcacgccgcgccgaccaccggctgaagctgcttgccgcgcagtccgccgaaggcctggcgattctccattggttcgggctggcacccgatcatttcgacacctggctgttcgtcgacggcgcctacgcctgcgacgacaacgatgccctgctcgaggtgctgcgcctgttgccgggcccctggcgtcacctgcgctggctgcgcctgctgccagcctggctgcgcgacgagtgccacgaggcgctacggcgcaaccgctggcgctggttcggccgccagcgcccgcccctccgtcgtcgctcctggcgtccccgtcgagcctgacgcctctccgcgctggccgtggcgggttatgctgcctgcgcaccagcctgcggacccatacttgccatggcccttgacccgagccaacgccgacgactgcgccacgcgctatccgacgccttcgtcgacactctcctggagcccgaggatatcgcccggcggataaagggcgtcgacccggcgttgctggaacggttgttcttcgaggaggtggcgccggtctgccacggcaacccgctcagccccgctccggcggtctggaccgccttcgacgaggcctggctggaagaggccatcgagcgacgcctggcgcggcaaaggagcagcgccctgcgacgctggcacgagcgctgcctggtcgcctggctgcgatggcgatacgccgacacctggcgcgcgatcgccggcgctctttgagcgagcgcctcagcgaaataccgaatggatgagcttgccggccttcttcgtgtcgaccgcctgctggcgtaccggcggcagcggctcgcgcttgtccttgtctgcctcgttcatctgcgccacccaggcgtccacccgatcgcggctgacggcgccgtagttgagacggcagctatcgacgagggtcttgcccttcttctccttgtagctgcactgcacgcggaagtcgccgatgtagttggtggcgaagctctcggcacggaacggcgcggagaacggcttggaggtataggtctcgtagtagtagtcggtcttggtcagcggcgtagaacgacagttggactccacgttcaccgccgtgtgggtgacgctgcgcttccttttctggactgtcttctccagcgcctcgccgttggcctcgcagcgctcctcgtacgcaccggtctcgcgggtgacggtataggacaggtacctcacctcgaactcgtaaagctcgtagtagcgcggcgtcagtgcgaggctgaacagctcggagtacgacgaggtggtgacgtgggctgcatgggtcttggaggcgggatcgcggaaacgcagggtcaggcgggtggacgggtcgttgctgccggtgttctcgaagccgaccacgccggtgacgaagctgggcggatcgccggcgcgcatggagaaccaggacgacaccgagccctggttcgccgggttgatgttgcagcccgccagcgctgccatgcaggcgagcacggcaggtagctttccttttctgggcgtcattgaaatccctttgctcgcgacaggaggaaaatatcgttaggaaacaacgttgagaggccggcaaggatacccgactggcgcacgggtcgcatcattatgacatcacgccgcccgccggcgttgccgcgaccgttcgtcgaacctgtgaattccggtagtttcccttgccgtcgctggcgtcccaggatcgggatttcctgtgttcgccgggaggatcctggcgtgtccacgaccagcctctgcccctccgccacgcgggaacacggtcccggcgcgaaacgcgtcctgcctctgctgttcctcacctgcctgctggatgccgctggcgtcggcctgatcgtgcccctgctgccgacgctgatcggcagcgtggcgccgctggcggtccgcgacgcggccacctggggcgccgccctggtgatgaccttcgcgctgctgcaattgttcttttcgccggtcctcggcagcctcagcgaccgcttcggacgccgccccgtcctggtcctggcgatgctcggcttcgccctcagctatctgctgctggcgctggccgacagcctctggatgctgttcctcggtcgcgcgctggccgggctcaccggcgccagcgtggccaccgcgatggcctgcgcggctgacctcggcacgcacgggcagcgcacccggcacttcggctggctgtacgccggcctcgctctgggcatgatcctcggccccgccctcggtgggctgctggcggtgcacggcacgacgctgccgctgttgctggccgccggcctgtgcctgctcaacgccctgctcgccggcctgttcctcgaggaaaccctgcccccgacgcgacgccgccgcctggacccgaggcggatgaatgccttgcgctcgatcagcggcctggctcggcaaccgggggtcggacgcctgctggcggtgcttgccctggtattcctcggcttgcaggcggtgatggtggtctggccgttcttcgtgatcgagaagtttcactggagcagcgcctggatcggctactcgctggccctctacggcgtgctcgcggtgctcgcccagactctcggcgtgaacctctgcaagcggcgcctggacgacgcccgcctgctgcgcctgggcctcgccctgcaaggctgcggcctgctgctgttcgccctggtcgactcgtcattctggctggtctgcgcgctgctgcccttcgcgctcggcagcctcgccaccccggccatgcaggggctgctctcggcccgcgtgccggtcgaccgccagggcgagttgcagggcgtgctgagcagcctgatgagcctcgccgcgatcgtcggtccgccgctgatgagcggcctgttccactggggcagcggtccgctcgcgccgctgcccctggccggcgcgccattcctcgccggcgcccttctcgttctggccgggctggtcctggcctggcaacttcgacctacgggagaagaacgatcatggaccggatagacatgggcgtgctggtggtactgttcaatcctggcgacgacgacctggaacaccttggcgaactggcggcggcgtttccgcaactgcgcttccttgccgtcgacaactcaccgcacagcgatccgcagcgcaatgcccggctgcgcgggcaaggcatcgccgtgctgcaccacggcaaccagcagggcatcgccggcgccttcaaccaggggctcgacacgctgttccggcgcggcctgcagggtgtgctgctgctcgaccaggactcccgtcccggcggcgccttcctcgccgcccagtggcgcaacctgcaggcgcgcaacggtcaggcctgcctgctcggcccacggatcttcgaccggggtgaccggcgcttcctgccggccatccatctcgacggactgacgctcaagcaattgtctctggacggcctgacgaccccgcagcgcacctcgttcctgatctcctccggctgcctgctgacccgcgaggcctaccagcgcctcggccacttcgacgaggaactgttcatcgaccacgtggacaccgaatacagcctgcgcgcccaggcgctggacgtccccctgtacgtcgacccgcggctggtcctcgagcaccgcatcggcacgcgcaagacccgccgcctcggcggtctcagcctcagcgcgatgaaccacgccccgctgcgccgctactacctggcgcgcaacggcctgctggtcctgcgccgctacgcccggtcctcgccgctggccctgctggcgaacctgccgaccctgacccagggcctcgcggtgctcctgctcgaacgcgacaagctgctcaagctgcgctgcctgggctggggcctgtgggacggcctgcgggggcgcggcggcgcactggagcgcaaccgcccgcgcctgctgaagcgcctcgccggtccggccgtggcgtccgtagcttccggcaaggccaaggcctagtcggcgaaacgcattcccgcatagggcgcttgccggcacgccgcgagccggctgcgcaggtcgccgacgtgggcctccaggcgatggccgtccgggtcgaggaagtagaacgaatcgccctcgctgcggttctgcttccattcgcgcacgccatgcgcgcgcagctgcgcggcgaagcgggcgaagtccgcggcggcgatgccgaaggcgtagtgcgtgtagtccgcggccggcccgccgtactgcggctcccgggacaggcacagccacagcgaacccagttcgagataggcgccctggtcccagcgcgcttccaggcgaaagccgagaagatcgcggtagaaggcgatgctggccggcaggtcggcgaccgccagggtcaggtgattgagaccggtaagcatgggggctccttacaaggtgtggcgggaggtcgattcaggcacgtcccagccagtcgccgcggatcatttccatcagttggcgcaagccgggttgcggctggcgtcggctcggatagtagaggcagaacggcgcgcccatcgaggtccagtccggcaataccagttgcagccggccactacgcagctcctcggcgattcccacctccaggcagtaggccaggccgacaccgtccagggccgcggcaaccgccgtattgctttcgttgacgctgaaggggccgggcacgtcgacctcgaccatccgctcgccgtcgcccagttcccatttgtagaacgagttgtcgcccaggcgcatgcggatgcaggcgtgccgcaacaggtcgtccggccgctggggcacgccgtggcgcgccaggtaatcgggcgacgcggccaccacccagcgcagctccccggtcaatggcaccgcgaccatgtcctggggcaccgtgccgccgtaacggatgccggcgtcgtagccgtcggcgacgatgtcgaccatgcggtcctccaccgaaagttccagttgcaggtccggatacgcctcggtgaagcgcctgaggaccggccccagcagcagccgcgaggcatcgcgcggcacgttcaggcgcagccggcccaccggcgaggtgcgataggcatcgagctcgccgagcgcctcgccgatcacctggaaaccatcctccagcttggccgccagcgcgctgccggcatcggtcggcaccaccgaacggctggtacggttgagcagcttcaccccgagccgcgcctcgaggttgcgcatgctgtggctcagcgccgaggtactgacacccagctcctgggctgagtgacggaagctgcggcgccggacgatggtcatgaagacgttcaggtcggcgagttcggaacgggtgaaagccggcattccagggctcctggcagttctcggaggtcaatgcagcattgagccacattcaatctcgggtgatctagagtaatcgctccgtgccgccgagcgcattgccggcaagcgttttcccgatctgcaggagtatttccatgagcgttgaaagcattcgcatcgagggtatcgacacgccggtctcgcgcatcggcctcggcacctgggccatcggcggctggatgtggggcggcgctgacgacgcgacgtcggtggaaaccatccggcgtgcggtggaatccgggatcaacctgatcgacaccgcgccggtctatggcttcggccattccgaagaggtcgtcggcaaggccttgcagggcctgcgcgacaaggcggtgatcgccaccaaggcggcgctggagtggagcgacgcgggcatccaccgcaacgcctccgccgcacgcatccgccgggaggtcgaggactcgctgcggcggctgaaaaccgatcgtatcgacctgtaccagattcactggccggacccgctggtggcgcacgaggaaaccgccggcgaactggagcgcctgcgccgcgacggcaagatcctcgccatcggcgtgagcaactattcgccggaacagatggacgggttccgccagttcgctccgctggccagcgtgcagccaccctacaacctgttcgagcgcgccatcgacgccgacgtgctgccctacgccgagcgtaacggcatcgtcgtgctggcctacggagcgctgtgccgcggcctgctttccggacggatgaacgccgagacccgcttcgatggcgacgacctgcgcaagtccgacccgaagttccagcagccccgcttcgcccagtacctggcagcggtcgcgcaactggaggaactggctcgcgagcgctatggcaagtcggtgctggccctggccatccgctggattctcgatcgcggccctacggtggcgctgtggggggcgcgcaagccggagcagttgaacggcatcgccgacgccttcggctggcgcctggacgacgaggccatggcccgcatcgagcggatcctcgccgagaccatccaggatccggtcggtcccgagttcatggcgccgcccagccgcaacgcctgatcggacggccggggcggcaacgcccctggccgctggcctgacggagcggcgaaaggcaaaatggcggtttttctcaaggactgccggatcagttatggaaaacgtctacaagaccccggaagcgcccctggtggaaacccgcggcgcgaagcgggcgcatttcttcgtcacttccctgggcaagatgagcgtgctcttcctcgtcaccctggggctgtacggcgtgtactggatgtacaagcactggaaggcccagcaaccgcagatggagcggcggatcagcccggtatggcgggcgatcttcggcatcttctttttccacgccctcgcccggcggatccaccaggccctgccggaagagcgccaggcactatggagcccgagcaaggatgcgacctgggcggtgctgctgacggtcgcggcgaacctgatcagccacctcaccgacgtggtccccgcgctggagccctactcgctgccctcgctcctgctgctgctcacgccgcttatcccgatgcgcaacatccagcgccaggccaacctcgccagcggcgacccgcagggcacgggcaacgccggctattcgggctacaacctgctgttcatcgtgctcggcgcgctctactggctgctgatcctgatcggttccgcggtgatcctcttcggctcgtcccagggctgagccgcctcagccgggaaacgcccggcgcaacagttcgggcagcacctcgccggccggaccgacgagacagtgttcgcgcggatggcgggtgcgcaccggttgcgggttcacatgcacgacgctggcaccgtgctccagcgccagtccgggtatccgcgccgccggctgcaccacgccggaagtgccgacgctgagcaacaggtcgcactcgcaggccgcggcgaaagcctcgcgcagcgccgcctcgggcagcgcctcgccgaaccagaccacgcccggccggacctgtccgccgcaggccggacaacgcggcggctcgatccgtcgtccctcttccggctcgaccgaatcgggcaaggcgtcccggtaggctgccgcgcaggtcgcgcaacgcggcgcgtgcaggctgccatgcaggtgaaggacgtcgcggctgccggcgcgttcatgcaggtcgtcgacgttctgggtgaccaaccgggtgtcggcgatccgtccgctcaatgcggcaatcgcccggtgcgcgggattcggctggacacccagcaccttcaggcggcgccactcgtaccagccccagaccagcgcgggatcgtcggcgaaggccgcgggcgtagccagggccgccggatcgtagcgcgcccagagaccgccaagggcatcgcggaaggtgggaatcccgctttccgccgacaccccggcgcccgtgaagatcaccaggcggcgggcgccggcgagcagttcgacgacagcgcgcatctcgctcctccgcttacagcgcggacaacgcgcggtattcgtcctgggcatgctggtcggtcatgccgctgacgaaatcctggagcatacggcagcggtggtagaactcccactgccgctgcaacgggtcctccgccacacctttcatggcctccaggtaagccttgatctgctggctcggcaggcgccgaaccagcagttgcggatgcggcgcggcggcctggcgaccttcggcgagggcctggaactcctcggccggcaggcgcagcagcggcgcgtagaaatccagcaggccctggatgatgcggtagccctgcaattccagggtttccacctccggatggcagaacacccattccatggccacgtccttgaacgtctggacgatggcgtgcggcaggctgccgtcctccatcagcgcgcggccgagggtgccggcatgaaccgcttcgaggttgtcgatgaactgctgggcggcgtgctggaccagcgggtggatcattttcacccgcaggcggatgaagaattcgctgaccttgttgatcggctcccgctcggccttttccagtgagtagtcgaccatccgctggaagctcatgttgtccgcgtcgccgggaatcggcgcgtccggcgaatggtggacggcaaacttcttcaccagcagatccgccaattgacggatgtcgaggatgcctttttccaccgagtcttcgatatcggccaggcaataggagatatcgtcggccgcttccatgatgtaggccacagggtggcgagtgcccgggcgcatgccgaggacttggcgcagttcgtcgacgaaggcttcctcggaaagatagaagcccggcttcttgttcaggtagtggttcgccgctgccttgtccggcttcggctcgtaggccggacgcacgtacttgagcaggccggcggtctgcgtgtaggtgaggttcaggcgcagcagcttcaccaccaggcggatggcctgggcgttgccttcgaaatgcttgaggtcggtgagcatgcgctgctgcaacaggccgtcgccctggcccggcggtacgcggcgctcgaacagggcgtcgagattgcgttcgaaccaatcgttgatggcgtactcgccgaaatgaccgaacggcggattgccgacgtcgtgcatcaggcaggccatttccaccaggctttccagcgcgccttccagcccgtccaggccgacctccgcggcacgcgggcccagttggcggaacagcgtgcggacgatgaaacgcccggtctgctgcacttccagggaatgggtcaggcggctgcgcaccgccgcgttgcgctccagcgggaagacctgggtcttctgctgcaagcgacgcacggcggcggaattgacgatgcgcccgcggtcgctttccaactggtagacgatgtcttgcagatcggtattcccggcatgtccgtaggtttccctgtcatgcggacgctggcgggatatccgctccttgaaatccacggcccctggcatctggcgctgttctccactcggtcggctgcgaaccccgagcctagcgcgtggcggcggtttaaccaaggtcgcgacaatccgtcccactaccgttcgcgatccgccctcttccccgggcggcggcaactggcagaataccccgctcggcaccagcgacccccgccgcagaacgggggcgccgccgatcatgcgtgcgcccagagaaacaggaacgttcagggaggttccgcatgagcatcacatccaccgacatctgccaggccgccgatgccctcaaggggttcgtcggtttcaaccgaaagaccggccgctacatcgtgcgtttcagcgaagactccttcggcatggacgtcgccgacgacagcatcacgcccaccagcgagttcgtctggagttcggtacgcgacgacgtcatgcgcctgggccgcgagcagttgcagatcctgctggaacagaacatcaacgaacgactgaacatcggcgagccgctactggtctatctgcgccgccaggacctgccggaaatcaccgcacaacgccagttgcgctgagcgccgtcgatcgccgcccgcgccgggcgctgcgccacgcattatgctggaagcgtccgccgccgtccggcgccgcggacgccatcggccatccggcgcgccacgcaggtgctgcgtggggaggtgaacgccatgagcaagggactgaacgcgaagaaggaaactcgtaggaaaccgctgaaaaccgcccaggagaaacgcctggcgaaacgagcgaaaaaacacgctccggcggcgccactcggcaccccatcgcggagctgagccaggccggagcagagccgcaggcgcaaccgctcaatcgtccgcggcggggtccaggtcggggaacagcacctcggtgaagccgaacttgctgaagtcggtgattcgcgagggatacaggcggccgatcaggtggtcgcactcgtgctgcaccacccgcgcatggaacccttcgacgctgcggtcgatcggctgtccctgcgggtccaggccctggtagcggatgcgccgatggcgcgataccgcgccgcgcaaccccggcaccgacaggcagccctcccagccctcttccatctcgtcgtccagcggggtgatccgcgggttcagcaggatggtcggcggcacggccggggcgtccggatagcgctcgctgcgctcgaaaccgaagatcaccagctgcaggtcgacgccgatctgcggcgcggccagccctaccccaccgacgtgatgcatggtttcgaacatgtcgtcgatcagccgttgcagctcctcgctgccgaacagttcggacggcaccggctgcgcgatgcgcaacaggcgctcgtcacccatcttgaggatttcccggatcatgccgccccctgataaaggtcagtaacgccctacatgctcagccagaaaaccagacaggacaagacgcaaagcgcttccatctccggcaattgcgccattgatttgacaccgaacggctttctttcccggcacatccggtaatattcgccgcacaccgactacactggccagtcgtgccaccccgctacgttttcctggaggaaacctttttgccttcgttgcccaccttgcagcccctcgacctctacaggcgcaccctggcctgcctggtcctggcggtttcctgcctgggcggcggaggcctgtgggcggacgacgcacggacgtcggtcgagcaacgcagcaatgcggtcagccaggttctgctgggcatattcagctacgtgcgctggccgaaggagccggcggtcctgcaactctgcgtggtcggaccgaccgagtacgccgacggcctgctccgcggcatggtgcaggccaatggcaggcgcgtgcatgcggaacgccgcgcggtggacaacccggacctcggcacgctctgcaacgtgatctacctcggagtggtcgacgagcgcgagcgccagcaggtgttccgcagcctggccgggcatccggtcctgtccatcagcgagcgtggcaccgaatgcagcgtcggcagcatgttctgcctcaacgtcggcggcccgcgcatcaccttcgaggccaatctcgactccatcgcccgcagcggcgtacgcgtgcacccgagcgtattgaaactggcaaggcggcaggccactccgtgatgaaccgtcgtcgtcgctatacgggttccaatccatcgctgcgccgggtgctctatcgcgcacacctgggcgtggcgctggtcgcggtattcaccgccgggctggcggtgaccctggtcggcctgctgaccctgcgcgcctatgccgaccccaaccagcaactgatcgcccgttccatcagctataccgtcgaagccgcagtggtcttcggcgatgcccaggccgccgaggagtccctggcgctgatcgcctccagcgaagaggtctccagcgccatcgtctacgaccgccagggacagaccctggccagttggcatcgggaaagcaccgggccgctgcacctgctggaacagcaactggcgcactggctgctcagcgcgccgaccgaacaaccgatcctgcacgacggccagaagatcggttcggtggaggtgaagggctccggcggcagcctgctgcgcttcctgctcacaggtttcgccggcatggtcctgtgcctgctgcttaccgccctggacgccttctacctgtcgcggcggctggtacgcggtatcgtcggcccgctcgaccaactggcgaaggtcgcgcataccgtgcgccgcgaacgggatttcgagaagcgcgtaccggaagccggcatcgccgagctgagccaactgggcgaggacttcaacgccctgctcgacgaactcgaatcctggcaggcgcgcctgcaggacgagaacgcctcgctggcgcaccaggcccaccacgacagcctgcccaaccgcgccttcttcgaaggccgcctgagccgggcgctgcgcgatgccaacgagcatcgcgagcaattggcggtgctgttcatcgacagcgaccgcttcaaggagatcaacgaccgcctcggccatgccgccggcgacaccgtgctggtcaacatcgccatgcgcatccgtgggcagttgcgcgaaagcgacctggtggcgcgcctgggcggcgacgaattcgccgtcctgctcgcaccgctggcgtccggcgccgacgccctgcgcatcgccgacaacatcatcgccagcatgcaggcgccgatccggctcagcgacggcagcacggtgagtacctcgctgaccatcggcatcgccctctatcccgagcatgcggataccccggcggcgctgctccacgacgccgacatggcgatgtacatcgccaagcgccaggcccgcggcagccggcgcctggcggaactcaacgacccccgcatccttcaggaagaaaaggagatagacagtgctaccccagaggctccacccaagtagattgcttgccctcgccctgttcagccttgtgctgggcctggccggttgccagaccaagccgccgcagaccggcctgagcgccgagcagatcgccgtgctccaggagcagggcttcgaactccgcgacgaaggctgggagttcggcatgtcgagcaaggtgctgttcggcaacaatctagaccgtctcaatcccgacagccgcaacaccctgaccaagatcgcccgcgccctgctcgcggtagacatcgacaaggtccgcctggaaggccacaccgacaactacggcgacgaaggctacaatcaaaagctctccgaacggcgcgccgaatcggtggccgcggtattccgcgaagccggcatgccggcggccaacatcgaggtccgcggccttggcatgagcaagccggtggccgataacaagacccgcgccggccgcagcgagaaccgccgcgtcgccatcatcgttcccgccgagtaatcctgcgctcgcgggctgcgtacggcccacccgtacctggcccgtccatcgcccggccccgccactaccccgcttccggcctatgttgaaggaagaagccagcagaccggcgtaccggccgccgctgccgcggatgctagactgaatgctgcgcaagaaaccgacaatcccggccgacctgccgcttgcgggtgctccgggattcaccgacagggggtatcgacctttgcctgttcgcccaaggaacaggccgtcagacgatgggaggcatgccatgaaccggcattactacatcagcgacaacctcgacgagctggaacggctcgaagccgaactggaagccagcggcatcgccaccgagcagatccacgtcctcagcgaaaaggacgcgaagaccggccagcgccatctgcacgaagtctctccgttcatgaagaaggatttggtccgctccggccgtgtcggcctgctggtcggcctcgtcctggccatcgtcgccgtggccttcgcctatgccagcggctggacggaaaccgccgccggctggattccggtgatcttcctcggcgccgtgctctgcgcgttctgcctgtgggaaggcagcttcttcggcctgcagcgcaccaaccgcgccttccgccccttcgaagaacgcctgcaccaggggcagcacctgttcttcgtcgatgtgaagaacgcccaggagccgatcctggtcaacgtggtcagccaccacccgcgcctgcaggacgccggcaccggccccgcggtctctccgctgctgctgggctggcagcaacgctggcggcagttccggcggatggtctgagcggcggggcctgcgcaccgcgcaggtcctgcggcgtccctccggctgctagaatatccggctacccgcccgccatcccggccggcgcggcccgtcaggaaactccatgaaactcgataaagcggcagccatcgcacagctcaaccaggccttgggcatgtccgtgctggatgccggcaacactctgctcgcccgcttcaacaagagcaagaacgtctggtggttcgatattccgctcagccaactgaaggccggcaagttcctcaacctgctgctggcgaacccggccggcgatgcagtggagcacctgaaggtgcccaccggtttccttcgccagcagcaggacagcctggaactgcgcgacaagaacgcccgccggccgactctcagcctggagctgagcgcggaccccggcaagcgcctgcgcgacgtccgccccggcggcgctggcctggacttcgccccgttcctccagccctgagcggaaacctcagcgcggcagttcgatgcgttccgggtggatcaggatcaggcctttcttgtagaggccgccgatggccttcttgaaggtccccttgctgaccccgaagagccggtggatatcttccggcgaactcttgtcgctgagcggcaggctgccgccggcctccagcagccgggcgagaatctgctggctcagctcgacggcggcctcggcgccgaccggctgcaggctaagggcgatcttgccgtccgcgcgcaattccttgatgtagccctgttcgcgcatgccgctgcggaggaacttgaacgcctcgttcttgtggatcaggccccagtgcttgccctcgatgatcgccttgaagcccatctcggtacgctccaccaccagcaggtcgaccgcctggccgacgctgtagcgtggcggcaggttgtccaactggcggtccaggcgtgcggtggcggtgatgcggttggtgcgcttgtccaggtagacgtagaccacgcagtagtcgccgacctgcaacggacgcttttcttccgaatgcggcagcagcaggtccttgggcaggccccagtcgaggaacaggccgatccggttgatctccacgaccttcaggctggcgaaaccgccgacctggaccttgggcgtctgggtggtggcgatcaggcggtcgtcgctgtccaggtagatgaacacgttgagccagtcgcccacttcgctgggctggtccttcggcacatagcgcttgggcaggaggatctcgccgtgctgggtaccgtcgagatagagcccgaactccgtgtgcttgaccacctgcagtgaattgaaacgcccgatgaccgccatgttgtctccccctgtcgaaggggcggcattctaccgggcgccacgcatgcgggcggaagtttttgccggtacgccgacgccgctcatcgccttgccggccattcgcgccgaaacatcctgaaccacgcggacatttcccaaatgccgactgtctactggcagtaagcacaacgatgtttcaaaatcgtgaaccctaaagacttttttggaacatccttatcaaggattctcgctgccgctcatcaggagttcctgtgcgtccactcagccgttggctctcatcttgcggctcgcttctggcgctggccgcgctgtttctggtcgttcccctcgccggccgctactggctcggctggtcgacgccgttcggctatctctcggacctggccctcggcagcctgctggtgctgctcctgcatcgacgctccctgtggttcgcgctcccggtcatgctgctctggtgcctgttcctgatcggcaatgccgaactggtcggcgcggtcgggcgcatgccggaaccttccgacctcaagtacctgctggatccgcagttcgtcagcagctccacccagggcggcggcctcgcccacctgccactggcgctcggcctcggtggcgcgacattgctttgcgtgctgctctggcgtcgccgcggtccgcgcctgccgcgctatgcctacgcgctgccggcggcgttcctggcggcgcatgtcggcctgcaatacctgcgtccgagcgatgccgaccaatggcagcagtacaacctgccgcacaagctgctagccagcgcgctcagcagtagccaactggcggtcgaagactggctcgccgacgaccgtccggacaccccgccggacgtcgccgggctcaaccagctcgacctttccggaacgccgctgctggccggcggagggcgcgcgcgcaacgtcctgatcgtggccatggagggaatccccggcgcgtatatcgccgccaaccgcgccgccatcaacagcagctaccacgaagcgccgatgcccaggctgagtggctgggccgaacgggcgatgaccaccccggactacgtgctgcacagccaccagaccatccgcggcctctacgccatgctctgcggcgactacagcaagctcgactcgggcacgccgaagggcgtcgagctgctcaacaacccggcccgggccagggagtgcttgcccgcccagctgcgccagcacggtttcagcacgcacttcctgcagggtgccggcctgcgcttcatggccaaggacaaggtcatgccgcagatgggcttcgacaagaccctcgggcgcgactggttccgcaacacgtcctacctggagtttccctggggcatggacgacaaggccttcttcgagggcgccgcgacctacgtgaagcagctgcgccagcagaagaaaccctggatgctgaccctgctcaccgtcggcacccaccagccctactcggcgcctgccgactacctggcccgctacccgagcgccaagcaggccgcggtggcctatctcgacgacgcgatcgacgccttcctcgccgacctggagaaacagggcgtgttgcgcgacaccctggtggtgctcacttccgacgaatcccacggtgtcgaccaggtgcgcctcgcctcggcctggggcttcaacctggtactggcaccggaacaggcggcactgccgccgatcaagagcggcgtctacggccacgtcgacctcgccgcgtccgtcctcgactatttcggctaccgcgtgccggcggggatttccgggcgctcgctgttccgcgactacgccagcggccgcgaaatgatgtcctacaccaacggcatgctgcgccaccacgacggcaaggacaccttcgtcgaatgcgatttccagcaggtctgccggcgctaccgcagcgagggcttcatcgccgacgaagccgagttcctcggtcgcttcagcggtcgccaggcacgcctggtcagccagcgcgccgccgtcctcgaccactccgtgcaacaggccggccagttgggccaggagttccagttcgccacccacgaacgcatccgcctgaagccggaaacccacaacgactggaccgacaacctgatcggcgcgcaatacctggagatgccgaagaacagcaggaccacggtcaccctgaagatccgcgccttgcagatggaccgcaacggcgcccgggtgacgctgaagaccaaggagttcgaacgcgacgttcccataccggtaccggacatcccgcgcctgctcaaaggcaagccgctggacatgagcttcaccttcgacaacccggaagcgcgcaaggccttctccttccacttgctcgccgagggccgcgggatcatcgagatcagcgacttccacgtggtcacggcggccaacccggtacccgtggaaagccgcagccaggtcgccgaagcggcgaaggaacagccgctgctgagcaccctgaaaagcctgttcgccaaccgccccgaaaccgaggaagcggaacgcgcggacgcccctcgggagcgcaccgtcatccccgagcagaaggccctgatcctttcgcactgaccgcgccggagcggcccgcccggccgccgcgcgctccccgctgaacccagcgccgtcgcgggcgtcgaagattcgcaagcaaccaggcgaaacggagaacggcatgaagcacctggcattcctcgccctcggcggactcctgctggcgcccctggccgaagcggccagcttcgattgcgaaaaggctgagcgagcggacgaaaaggccatctgcgcgaaccgggcgctgaacgacaaggacgtcgagatgagcgtcaagtaccgcttcctccgcggcctgttcgccatgggcggccgcggcgccatgcaggaccggcagcaggactggctgcgccagcgccggcgctgcggtggcgacaccgactgcctctcccgcgcctacgcgcagcgtatcgacgagctggacaagcagtacgcgggcatcgacaagccgctctgaagctagcgtccgccggcagcgaactgcagttccgccaggcgcgcatagagcgggttctcggcgatcagccgggcatggctaccaatggccaccagccgcccctggtcgatcaccgcgatgcggtcggcgctctgtaccgtggccaggcgatgggcgatcaccagggtggtacgtccgctcatcaggcctggcagggcctgctggatcaggtgctcgctttccgcatccagggcgctggtcgcctcgtcgagcagcagcaccggcgcgtctaccagcaacgcccgggcgatcgccaggcgctggcgctggccgccggacaggccgatgccgccctcgcccaggtgggtggcgtagccctgcggcagacccaggatgaactcgtgggcatgcgcggcacgcgctgcggcctcgacctcggcggcgctggcatgcggacggccgtagcggatgttttcctcgacgcagccgaagaacagcgcggggttctgcgacaccagggcaaagctgcggcgcaagtcggccgggtccagttcgacgatcggctgtccgtccagcagcagccgtccctgctgcggatcgaagaaacgcaggagcagatcgaacagggtcgacttgccggcgccggaaggtccgaccagggccagggtttcccccggttcgacggccaggctgatgtcgtcgatggcccagtgttcgggacgggtcggataggcgaagcgcaccgcctgcaattcgatcctcccgctcacccgtgccgccagcttgcgtggttgcgctggcgggcggatctcgctgcgcgccctgagcagctcggcgatgcgctctgcggcgccggcggcgcgctgcaattcgccgatcacctcgctgagggtgccgaaggccatgccgacgatcaggctgtagaagacgaacgcggccagttcgccggccgagatgctgccggcgatcacgtcgcggccgccgacccagagcatgacgccgaccgcgccgagcaccagcacgatcaccacggtgatcagccaggcgcgctgggcgatgcgcttgcgcgcggtgtcgaaggcgcgttcgacggtgccggcgaagcgctggcgatcctgcgcctggtggttgtaggcctgcacggtcttgatctgaccgagggtttcaccgacgtagctgccgacgtcggccacccggtcctggctttcccgcgacaggctgcgcacgcggcggccgaacagcaggatcggggcgatcaccagcggcaacgccagcaccacgatgctggtcagcttggcgttggtgacgaacatcagcagcaccccgccgaccagcatcagggcattgcgcagggccatcgacagtgaggaaccgatcaccgtctgcagcagcgtagtgtcggcggtcaggcgcgactggatctcggagctacggttggtttcgtagaaaccgggatgcaactcgatcaggtggtcgaacacgcgcttgcggatatcggcgacgaagcgctcgccgatccaggacaccaggtagaagcgcacgaaggtgcccacggccaggccgagcaccagcacgaagaacagcaggatgtagcgattgagcaattcgggcgaggcggtgaggaacccctggtccaccagcaggcggatgccctggcccagggacagggtgatcgccgcggtgaacagcagcgccaccagggccccgagcatgcgccagcggtaaggcgccatgaagcgccatgccaggcgcagggcgatacgttggcgggaggagagaatggctggcatgcggcgctcgctcggcggctggggttccgcaggttagcaccgggaacgcagcgaggcgatgcatgccccggccggcagcgcgatgatatcgacgtatatatccgggcaacttagccgataactaatcgtgaacttttcattattctcgatataggtgagatagaggcccggagaactttctcgcatcaactaatgcaaacattggaattcatgccgggatgcgcgaagggagttatccacctggcggtatcctgcgtcgcccgggatcggcggaacatccagccgcggagacctcgagcagttcgccgccggatcgccaatgccgcagcgcctcgctcgggtattgcctaacggactttatagaaaacagcaggttacgtccgaaatctgatcgacaatattcaagatgaaataaaacgccgcttcggttataatgaacggccatatttaatgcagagacaggtccccggatatggccatcatgaagaaaaccgtcgcgccgaaagccgccaagccggctcccgcggtcgaaacccgcgagtccatcgaagcgcaggtcgccgccttcctccaggccggcggcgagatccagaagatcgccaagggcgtcagcggccaggtctacggcccgtcgcggcagatcaccatcagcaagaagcgctgaacgcccgcccctcgccggggactacgaaggggatggcaggccggcacgcagatgtgccacgctccatcccctttttcattgcctgaatcccgagcccttcatgcctggccatcccgatccactgcacggcgtcaccctggaaaaactgctcaccgaactggtcgcccaccacggctgggcggagcttggcaaacgggtcgacattcgttgtttcaggaacgacccgagcatcaagtccagcctcgccttcctgcgcaagacgccctgggcccgggaaaaggtcgaggcgctctacgtccagctcaagcgcaatcaaggctgaaggctagcgcgccaaccccaggcgcagcaattgcccgtccttctggtcggtgagcaggtagagatagccgtccgggccctgccgcacgtcgcggatgcgcaccccgagatcgcccagcaggcgctcttcgtggacgacccggtcgccatccagttgcaggcggatcagttcctgcgtcgccagcgcgccgatgaacaggttgtgctgccaggccgggaagcgctgcgcatcgtagaacgccatgccgctgatcgccggcgacttctcccagacatggtgcggcgcctcggtaccgtcgacggccttgcccctggcttcggggatcggcagcagggtgtagttgattccatgggtcgccagcggccagccgtagttcccgccggcctggggtatgttgatctcgtcgccgccgcgcgggccgtgctcgtgggtccagagctggccggtccagggattcagcgcggcgccctgctggttgcggtggccatagctccagatctccggccgcgcgtctgtacggccgacgaagggattgtccttgggaacgccgccgtccggatacaggcggacgatcttgccctgcaacttgtccaggtcctgcgaggtgctgcgctggttgttctcgccgagggcgatgaacaggtggcccttgccgtcgaagaccaggcgcgagccgaagtgatggccgctggaaagcttcggcaactgccggaagatcacgtggaagccctccagccgtcgcttgtccgccgataaccggccgcgtcccgccgccgttccggcgcggccgtcctcgccggcctcggcataggtcaggtagaccagccggtcctcggcgaaccccggcgacaaggcgacgtcgagcaggcccccctggccgctggcgaagaccctgggtacgccttccagcggcgccgacaactggccctcgggactgacgaaacgcaagctgccgggccgctcggtgaccaacatgccctggttgtccggcaggaaggcgacggcccagggataggccagaccgccaaccaccggggtgacctcgacggcgcccagctcgctgtcgtggcgaccggcgtccaccgcctcggccgacggggcgagcagtgcgacagcgctcagcaggatggcattcaaagacaggcccggcatgcgttctctccttcccaagcaaaaacaccactctagtcgcagatccgccgcgcctggcggtccgcacacgggctgtaacaaacccgcccctcaaagcaaggcgaccatttccttgagggtcaccgcccaggtgcccttggcattgatatagcgatagccgaaccgggaaccgtgcgcctcgctggtgatcaccgcgttccaggcctgcccgcgcggcaggtcgtgggccgggtcgaggagcaggaaggcgcgctcgctcatgccgatggccaggccccagtggcggatatcgctgcccttgcggccgtggaaaccgagcactaccggaaagccggcctccaggtattcgcgggtgtgccggaccaacctacgcccctcgcccttgagggcgaaatgctcggtatcgttgatctcggccagcagctccagcaggtcgacgccggtggtgccgacgcgcagcagcgggccgtgctggtccagcgccttcatcaggcgcccgtagcgactgcgactgtcgacccgctccaggcccttggcctggcgccggcgcagttggccgcggaccagcatcgccatgaccaggcagtagggcccgcaggcgccgtccatgtcgccctggcgcagatggaccttgtcgccatggacgttgcacaggccgccgctgccatcctcgtccaggtcccattccaggccatcgatcaggcgtgactgcatgagggtctcctctccggttccttaagttgggaccgagcgggcgccgaatcattcctcggcgcccatcgccacaacgagtaaactggcggtctttcattccagtagcctcgccatgaccgacccgatccgcctgtccaaacgcctcgccgaactcaccgcctgctcgcgccgcgaagccgagctgtacatcgagggcggctgggtcagcgtcgacggcgaagtgatcgaggagccacagttcaaggtgctcgaccagcgcgtggagctgctgccgggcgcccgcgcggaaacgatcgaaccggccaccctgctgttgcacaagccggccggctggcgccacgacgatttcgaaggtctgctcgccgcggggcgacgctggagcgatgaccccagtcccttgcgagcgctgaaaaaacacttcgcccgccagcgtcccaccctggcgctggacagcgaggcttccgggctggtggtgttcagccagcagcacggcgtactgcgcaagctggtggacgacggtgcacggctggagcaggaatacctggtcgaggtcgccggcgacctggccgccggcggcctcgagcgcctgcgccacggcctcgcctaccagggccgcaggctatcgccgtgcaaggtcagttggcagaacgaaagccacctgcgcttcgccctcaaagacgtgctgcccggccagttgcgcttcatgtgcgaaagcgaggggctggaagtgcggagcatccgccgcctgcgcatcggcgcgctgtcgctggccaggctaccgctcggcgaatggcgctacctcggcctccacgaacgcttctgagcgctcattcgaggccacgcagggcgcgccccggcgactgcccgcagacccgccggtacatggcgatgaacgcactgtcgctggcgtagcccagggcgtgggcgacctcggtcaccgagcggccttcggccaggcgtctccgcgcttcgaacaagcgagcctgggttcgccagcgagagaaacccaggccggtctgctcggtgaacagacgcgccagggtccgcccgctggcgccgacctcgcgtccccatgcctcgatgctccagtccagcgcgggttgcgccagcagcgcctcggccaccttcagcgcccgcgcatcgcgcggcatcggcaggctcgcggcgtgtgccggcgcgctcgccagttcatcgaacagtgcgcgcaacagcgtcaggtgccgcccttccaattgcaagtcggctgcccagccggtcatgcgcaggatcagttcgcgcagtagcggcccgacctcgaggacctggacgctgtccggcagctcggcgaacgccgagggttcgaagtacaggctacggtaggcgaagcgcccgtgcaggaccgtgcgatgcggcacgccggccggcagccaggcggcctgaagcggcgtcaattggcaaatgcgctcggcgaaatacagcgtgacgctaccggccgccatgtacagcaactgcgcgcgctggtggcaatgccagtcgctgcggtggccggtgctgtcgacctcgaggccgaccaccgggcagcgggcgagatcgggatcctcgacccgttcgtagggatagcgcggcaccttgtcctcttcgcgatgttttccgtcctgaccgcagcattctgccaggcgcaagcgacctaggcttggctcttttttccggagccatcatgcctgaccgtcctcgccctcccctgctgctggtgctcgccctgctagccctgccgcaagtcgccgaaaccatcctttcccccgcgctgccggccctggccagccactggcgactggacgacgctaccagccagtggaccatggcgctgttcttcgtcggtttcgcccccggcatctggctctggggctggctggccgaccgcctcggccggcgcccggctctgctcggcgggctcggcctggcggccctggcgaccttcggtgcctgggccagtaccgactattcctacctgcttgcctgtcgcctggcccagggcctcggcctggcgacctgctcggtgacggtgcaggccagcctgcgcgatgtgctgcaaggcccggcgttgatgagctatttcgtcacgctcggcgcggtgctggcctggtcgccggcagtcggtcccctcggcggccagtggctggccgacctcggcgggcatccggcggtgttcgccaccctggcggtgctgctcgcctcgctggcggcgctggtcgtcccggcctggccggaaacccgtccgctgctggcgggcacgcccgagcccgcgaccctggcgatcttccgacgggtcctggccgaccgaccgctacagacgcgcgcactgctggtggcggtgctcaatgtactggtgttctccttctacgccgccgggccgttcatggtcggcgacctgcccggcctgggcttcggctggatcggcctggccatcgcccttgccgggagcctcggcgccttgctcaaccgacgcctgccgcacacctggaacagcgctcgccgggtacgcctgggcctggcgctggcggccgccggcgcgacagcgcagacgctgttggccgccggcggatacgccgaaggcccgtactgggccctgccggccctgccgatcttcgtcggcttcggcgtggcgattcccaacctgctgggtccggcgctgcacgcctacgacgattgccggggacgcgccggagccctgttcgggctcgcctactacctgctgatcggcctcggactgggcgcgtccaccctgctaccgttcgaccgtccctggccgctggcggcgtactggagcctgctgggcctggtcgcactgctgctggccaggcggctgccggaatgaaagcggcgccaggtacgcccgtgcaaaccggacaatcggcccggaaagccggatagggcggccgtcgcgacgctgctatgctgtgatggcacagcgcccacgcggacccgcagaacgtggccagaacgacgctcgaatcgatccagcacgccatcgaggtgaattcgtccctggcccttcccatcgccctggagaatctctcgcgtctgacccacctcgcgctgctgaccgtccccttcaacctgatccacatcctggtgttttccctgaaggacttccgcccggacctcggccatcagctctggcgccaggaaatcatgtacgcccatggcgccatggccctgctcttcggcggcatcggcctgctcgcgctatggctgcgccgccagccacccaagctgtggcgcatgcgcctgctgatcctgctgggcggcgcagggatcataggcttcggcgtcgccatcgcctgcatcgaccagcgcatcaccagcaacatcacgccgctgctgctggcctgtttcgcctgcgccatgttcatcctgatccgcccggcctacgccgtgcctttctacggcctggccatgctggtcttcgaggtggcgatggaccacgcccaggccgacccgcaactgcgcctgtcgaaccaggccaacggcctcaccgcgttcggcctcagcctgctgctgtcgctgatcctctggcacgggcacgtgcgcaacctgcgccagcaacgcaagctggagttgcagcggcaggagctggaggagaagaatcgccagttggagtacctggccggtcacgacccgctgaccggcctgttcaatcgtcgcgaattcgaccagctggtgctcatggaactcgcacgcatcgctcgccaaccgcagccgctgagcctgctgatggtcgacctggatcacttcaagtacatcaacgaccgctatgggcaccccttcggcgacgaggtcattcgccataccgccaacctgctgcgcggcaatacccgtagcagcgacagcgtggcgcgcctgggcggggaagaattcctcctgctcctgcccgacaccgccgagcagcaggctcgcagccttgcggaaaaactccgcgaatgcctcgaaggtaccccgctggcgacgcaggacggcgtgctctgcctgaccgccagcttcggcgtggccagcctcgacggaggcggccaggccagctacgagcagctctacagcgccgccgaccaggctctctaccgggccaagagcagcggtcgcaaccgggtggaagtgattcgcctggccagcctcgcggaaagcctgcggtaacaattgatcggccggccctgacgagcggtcggtcagccgccggaaccttggttaagatgatccgtggcgctctagctcgccgctcttcctgcccttccgacctgcccgacctcgcccggccccatgccgcggccttgccgttggcgtcgtgcgggaagaccggcgctgcgccgttgtccgcattaccaggggagaaccatgctcaagcacctgctcgtgctcacctgcgccctgctcgccagttcctcggccctggcccaggtgatggcccgcgacctgggcgatttcgaactcaagctggccaccagtccgacccgcagcatggcccagggcctggtcaccccgggcagctccggcagtttccacggcggcctcgacctaagccacgaaagtggctggtacatcggcaactggacctccaacctcgaccccggcaagcccaccgagatcgactcctacgccggcttcaagcgcccgctgaacaaccgcctgggctacgaaatgggcctgatccgctacagccgcccggagcagccggccaacgacgcagccgaactctacggcggcctgtcgatcttcggcagccggctcggcgcggccctgagcagcgacccggggcgtaacgacaccaccctgttcgccgacctcggggtcaacccgccgttcggtttcgacgtcaccctgaagtacggcaaccatcgcctggacaacccggcgagcctcagcggcgggggctacgtgagcgtcttcaacgactggtcggtgaacctctcgcggccctggctgggcatcgacctgaacctgtcctacagcggcaccagcctgaccggcagcgattgcagcgcctactcgggacacaacagctactgcgacaccacgttcatgctgaaggcgtcgcgtccgttcttctgagtcgtcagtcgtcctggcggcgggtacgctgggcgagttcgtcgagctgtttctgctcgcgcttgtcctcggcctggcgcgcctcttccaggtagcgctcgaccagcttgcgcagcccttccaggcgggcgtatctctcctgccagttgagccgcgccttgtccaccgcctcgcggtgccaggtcacgctgttggcctgctgggcgacggcggtctccagttgcgagaggaagcgctggtagttcatcagccactggccgctgacgcccttctggccctggctgatccattgctgctggtagtcgttgcggtagcgttccagctccgccagcttctgctgtgccgcgagcaattgctgctggcacctgcccaactgggtcgcggcatcccgctcggccttgctggccatgtccaccaccggcgccagccgcgccgcacgcttctccatgcctcagggcgcctcaggcctgcccgccggcgagcaggctcgccagccgcgcacggctttccgccaggctttcgctttcgtcgaggccctggcgcaggaactggcgcatgaccgggaagcgagcgatggccaggtcggtctcgggatcgccgccggccacgtaggcaccgacgctgatcagatcgcgactctgctggtagcgcgaccagagctgcttgaagcgctgggcgtcgcgcaggtgctcggcctcgaccacctgcggcatcacccggctgatcgaagcttcgatatcgatggccggatagtggccttcctcggccagccgccgggacaatacgaagtgcccgtcgagcacgccgcgagcggcgtcggcgatcgggtcctgctggtcgtcgccctcggagagcacggtgtagaacgcggtgatcgagccgccaccggcttcggcattgccggcgcgttccaccagcttcggcagcttggcgaacaccgatggcggataccccttggtcgccggtggctcgccgatggccagggcgatctcgcgctgggcctgggcgtagcgggtcagcgagtccatcagcagcaatacgttcttgcccttgtcgcggaagtactcggcgatccgcgtgcagtactgcgcggcacgcaggcgcatcagcggcgcgtcgtcggccggcgaggcgaccaccacggagcgcttgaggccttcctcgccgaggatctcgtcgatgaactccttcacctcgcggccccgctcgccgatcagaccgacgacgatgatgtcggccctggtgaagcgggtcatcatccccagcagcaccgacttgcccaccccggtaccggcgaacaggccgaggcgctggccgcggccgaccgtgagcaggccattgatcgagcggatgccgacgtcgagaggttcgctgatcgggtggcgcttgagcgggttgatcgtcgggccgtccatcggcacccagtcttcggcgcgcattccgcccttgccgtcgagggcgcggccggcgccatcgagcacccggccgagcatcgacatgcccatcggcaggcgcccggtgtccggcagcggcacgacccgcgcgccaggcgcgatgccggcgaggctgccgaccggcatcaggtacaccttgctaccggaaaagcccatcacttcggcctctacctgcaccgggtggtagccgctttcgttgatcacgttgcagcggctgccgaccgcggcctgcaagccttcggcttcgagggtcaggccgaccatgcgcagcaggcggccctcgaccaccggctgcgccggcagcgagacagcctcggtgtagccctccaggcgcctggcgaaactggttcgctcaaggcgcatcgacgtctccgggggcgtcgaggtcgatccggatgtcgctggccagcggatgggtcgcctgttcgcgctgttgctcgaacagttgcttcactgcctgcgccaggcgcgtctcgatggtcgcgtcgatgcgactgtgctcggtctcgatgcggcagccgccgggcagcaacgaatcgtcctcgagaatccgccagctctcttcgtggcgctcgcgcagcgccttgacccgctcgaagtcctgcgggttgacatggatacggatgttcgccgcgcccatcggcagcagcttcagagcctcgcgcaggacctggcggacatggctggagtccatgtgcagttcgcgctggatcacttggcgggcaacgtggttgaccaggttgaccatgccctgctcgatcagggcgtcctgctcggcgatgggttccagaagctgcgtcatcagacgctcgagactttgcagacgctccttcagcgcctcctcggcttcctgccgcgccttcaactggccggcgtggaaaccgtcgcgctcgccggtggcgaagccttcgttgtaggcgtcctggcggatcgcctcgatctcctccagcgtcggcggcttgacggtctccagctcgacctcttccaccgccggcggcgccggcgcgggttcggcgaccgcgggcacctgcggcgcggcaacggccggctcgtcgcgcggctcgtcgaagctcggcaacgaccagaggccgaaggccgccacgtccttgccgcggatcagttcgctgggattgtctttgtccttgtcgtgggggaccacctcagatcatctcctcgccacccttgccgcccagcacgatatcgccggactcggccatgcgccgggcaatggtgaggatttccttctgcgcaccttccacttcgctgacccgtaccggccccttggcctccaggtcgtcgcgcagcagctcggcggcacgcttggacatgttcttgaagaccttctcgcggatcgcctcgtcggagcccttgagcgccagcaccagtacgtccgaggagacttcccggagcagcgcctggatgccgcggtcgtcgacgtcggcgaggttgtcgaagacgaacatcaggtcctcgatctgtccggacaggtcttcgtcgacctcgcggatcgaatccatcagctggccttcgatggagctgtcgaggtagttcatgatgtccgccgcgcgcttgaccccgcccatggtggtgcgggtggcgttggaattgccggcgaactgcttctccaggatcaggttgagttccttcagcgccgagggctgcacggtgttcagcgaggagacgcgcaggacgatatccaggcgcaccttgtggtcgaaatggctgagcacctcggcggcctggtcgggatcgaggtaggcgaccacgatggcctggatctgcgggtgttcgtaacggatcacgtcggccacggcacgcggctccatccacttcaggctgtccaggccgctggtgctgccgccgaggaggatgcggtcgatcaggttgttggccttgtcctcgccgagggcctgggtgagcatcttgcggatgtagccgtcggcaccgacgccgaggctggtctggtcgccgaccacttcgacgaactcgcccatcacctgctcgacctgttcgcggtgcacgttgcgcatcgacgccatggccacgccgacccgctgcacctctttcggccccatgtgccgcagcacctgcgccgcgtcggtctcgccgagcgacaggagcaggatggcggccttgtcgaccttggtcagtttggcggcgagacgattctcactcatggcacttactcatcggcgttgatccactctttcacgacctgggcgacgcggcccgggtcctgtgcgaccaggttcttgatcgcgttcaattgcgcatcatacccctccgtggggctcggcaggaggatgctcgacggcccgccgatgctcacccggtcgtcggccagcgagccttccaggccactctcgcccagcgccaggtcgccgtcgcgaccgccgccgccggccagcgacttgcccttgccgccgccggtgatgttgctcaacaccggacgcagcacgccgaacaccaggaccaggatgaacagcacgccgagcacctgcttgacgatgtcccagaaccacggctgcgagtagaacggaatgctgtcgatctcttcggcctgggccggggcgaacggcgcgttgatcacgctgacgctgtcgccgcggctggcgtcgtagcccaccgaatcctgtaccaggcgggtgaagcgcgccagttcgtcggcgctccagggctggtggctgacctcgccggtcttcgcgtcgaccttcatctggtcgtccagcaccaccgccaccgacagtcggcgcaagcgcccctgctgctgcttggtgtagctgatcgagcggtccagttcgtagttgcgggtggtctggtcgcgcttgtcggtcgggtacggcgccagctccggcttgccggtcttcggatcgatgatggtctggccgttggcgtccttcagcggctggcccggcgcgacgtagtcggccggcgcgctggcggtggcctgctgcggagcgctggccgggcccggcggctggttcgacagcgcccccggcacgccctgcggcccggacgaattctgccgttcctcgttgttgcgttgctcgctgcgcagggccggctggtccgggttgtacatctccgaggtcgactcgaccgcgctgaagtcgacgtcggcggacacctcggccttgtagcgaccgttgcccagcaccggttgcaggatattgtgcacgcgctgggtgagcaggccttccatgcgccgggtgaagtcgaactgcttgccggccatggtcagctcggagagttcctgctggtcggagagcaggttgcccttctggtcgaccacggtgacttgcgacttgtccagctccggcacactggtggcgaccaggttgacgatcgccatcacctggctcggctccaggctgcgacccggatacagctcgaccagcaccgaggcgctgggcttgcggtcgtcgcggacgaacaccgaactcttcgggatcgccaggtgcacgcgggcggccttgacgttgttcaggctcgacacggtgcgcgccagctcgccttccaggccgcggcggtagttggtggcttccatgaactggctggtgcccagcgcctgttccttgtcgaggatctcgaaaccgacgttgttgtcggtcggcgccacgccggcggaggccaccttcatgcgtgcccggccgaggtcgtcggccttgaccagcagcgcgccggagttgggttcgaccttgtagggaatgtccgccgcggtcagcgcttccaccacacggttcgcgtcgaccccgttgaggctgccatagagcggcttgtagtccggctgctgggaccagagcacgacggcgaagccgatcgccacgctggcggcgagaccgaccagcaggccgatctggcgcagcatggtcatctcggaaaggttgtcgaggaacgacagtcccgggaaggatttcttcagcatcccggcaccgccgctcttggcgggaacctggctgtcgatcagtgcatcggccatgaactagttatcctcgcgccgctcagaccggcatctgcatgatgtcttggtaggcctggaccagtttgttgcgcacctgggtcatggcctggaacgacacgctggccttctggctggcgatcatcacgtcggtcaggtcgacgccgctctggccgacctcgaaggcgttggccatcgcggtggaggcctgctgggtctcgttcaccttgtccacggcctgggagagcatttccgaaaagctcggcgcccccacttcggccggcgcctgaaccggtttggccttggccatggcttccatttgcatggaacgcatttccagcatcagacgattgaactcgacaccctgactcatgactcttcctccaacagccgcggcttttttgacgccgcccggcactttgcagaggagttagcaacaagggtgccaagtcgaccccaaggcccggcatcggcgttcgccgccaatgcccgcgaccgctgcagggtccgtccctgctccggttatcggcaggcgcgcacgctcgaacagccccgggcgacgaccggcggcggacgcaaaaggcccgcacgaggcgggcctggggaacatggcgagcactcagatggcgtagagataggcctccacgtccatccccgcgtcgcgcatctgggcgagcttgtagcgcagggtccgtgggctgatgccaaggcgctcggcagcctccttgcggcggccgcgctcggtgcgcagggtatcgatgatcacctggaattcgcggcggcgcaggtcgtcgcccagcgcgccgctagcgtcctggcctgcggccggcgacggaatctcgacgctcggcggggtggccggtggcattgccggcatgggcaccggcaccggggccgcgagcggcatgccgatcggcgcggtgaggcacaggtcggcgggctggatcaggccgccctgttgcaggatcaacgcacgctggatggcgttgtcgagttcccgtacgttgcccggccaggcatgccggaccaggcactgggcggcctcggggccgagcgccaccgcgccgaggttcatcttgcggctgtgcttgcgcagcagacgctcggccagcggcaggatgtccgcagggcgttcgcgcagcggccgccaggccagcgggaagaccgacaggcgatagtagaggtcctcgcggaaacgccccgccgcgacttccgccgcgaggtcgcggttggtcgtggcaagcacgcggatatccaggttgatcggcttgcgcgcaccgacccgctccacctcgcgctcctgcaatacgcgcagcaacttggcctgcaggccgaggggcatttccgatatctcgtcgagaagaatggtgccgccgtcggccagctcgaacttgccgggctgggcggcaatggcgccggtgaaggaacctttctcgtggccgaacagggtggcctcgagcatgttgtccgggatcgccgcgcagttgatcgcgatgaacggcttgccggcacgcggcgattgctggtggatatagttggccaggacttccttgccggtcccggactcgccggagatcagcacggtggaatcgctgcgcgcgacccgcgcggccagttccagtaactgccggctggccggctccagggccaccggaccatcctcctcgctgcccggcaactggcccagcgcatggcgtgccaccaggtcgagcagcgcccgcgcctcgaacggcttgaccaggtagtcggcggcgccctggcgcatcgcctcgacggcgcgatcgaccgcgccgtaggcggtcatcagcaacaccggcaggtgcgggtagcgtgtacggatcaggccgagcaactggtgtccgtccatgcccggcatgttcacgtcgctgatcaccaggctgaaggcttcgcgggccaggaccggcagcgccgcctccgccgagtccacggcgacgaactcgtgaccgcccagcagcagggtgtcgctgagggcttcgcgtagtgcgcggtcgtcttcgaccagcaggactttggctgccatggggttactcctgaatcgcagaaagaggcgccgccggaatcagcggcaggatcaaggtggcgcaggtgccgcgccccggccgagagcgcaactgcaattgcccctggtgggcgcgcgccacggccttgaccaccgccaggccgagcccggtaccggtggtcttggtggtgaagaagggttcgcccaggcgcgccagggtcgccgggtccatgcccggtccgttgtcgctgacgctgaggcgcaggctgtcggcgcgggcatagagatgcaccttcaggcgcagttcgggcccgcaggcctggatcgcgttctccaccaggttgagcacggtgcccaccagggtgtcgcgattgcacagcagctcgccgccgcgcgcctcgcactgccaacgcacctggagcccctggacatggacttcggccgccgcgcgcaggctgtcgaacagcgccttcggcgccacccggtcggtcagtggcagctcgccgcgggcgaacaccagcatgtcgcgtacctgatgctccagttcgtgcaggcgctccttcaggcgcccggcgaagcgttgctgctggtcggtaggcagcgcctgctcgctgaggtgcccggcatagagcaacgccgccgacaacggcgtgcggatctggtgggccagcgaggcgaccatccgccccagcgccgacaggcgctcgtggcgcgccagttgctcctggagacggcgggtatcggtaaggtcgttgagcaggatcagttgacccggttcgccgttcagcgagcgggtggcgatggacaggcgacgtccgtcgcgcagggaaatctcgtggccgtcatcctcgcgcggagcgaagcagcgggcgatcacctcgcgccagagcatgcccaccaacggttcgccaagcaggcccagggccgccgggttggcctcgcggaccacaccatgggcatcgatgacgatgacgccgccgggaagcaggtcgagcaggctctgcaagcggttggccaggcgctccttttccgccagctcctccatgcgctgcgcgctgaccagggccagttgccctttcagctcggtaacgcgctcctccagcaggctgtaggactcgctgagctggctggacatctggttgaacagcgcgaaggcctgctcgaggccggcgcggctggtggcctcggccgtatcggctggctgctcggtgaaggcgttgagggctggttgcattgcgtttctctcggtcggcgcgacgtcatggttctgtcggtcgacggagatatagcaatacccgtgcctaaatttttttcatttgaaaatcaaagcgttgcgaaacgacctgtcaatcatccgacaggtcgtcgtcgcgccggctcatgccgtacttgcgcatcttctccaccagcgtggtgcggcggatgcgcaggcgttcggcggcccgcgcgaccactccgccggcatcgtcgagggcctgctggatcaggccctgctcgaggttggccaggtagtccttgaggtccaggccttcggccggcagcatcgccggcgcgtccattcccggcagcccggcgttgatcgccgcgcgctcttccagctcttcgcgcaggctgctggcgagttgctcgtcctcgtcgtcgacatggcggaatttcttcggcagttcgccgaccccgatcaccccgtagggatgcatgatcgccaggcgctccaccaggttcgccagttcgcggacgttgcccggccagtcgtggcggcagagcgacatgatcgccgccgagttgaagcggatcgacccgcgcttctcatgttccatccgcgagatcagttcgttgagcagcagggcgatgtcttccacccgctcgcgcagcggcgccatctcgatggggaatacgttgaggcggtagtagaggtcttcgcggaaagtgccgtcctcgatcatcttctcgaggttcttgtgggtcgcggcgatgatccgcacgtcgacgttctgcgtcttgttgctgccgaccctttcgaaggtgcgctcctgcagcacgcgcagcagcttgacctgcatcggcagcggcatgtcgccgatctcgtcgaggaacagggtgccgccgttggccagctcgaaacgtccggcacgactggtgatggcaccggtgaaggcgcccttctcgtggccgaacagttcgctttccagcagttccgccgggatcgccccgcagttcaccgggacgaagggcccctcgcggcgcttggaatggtaatgcaggttgcgcgccaccacttccttgccggtgccggactcgccgaggatcagcacgctggcatcggtatcggcgacctgctgcatcatctgccgcacctgctggatcgcccggctggtgccgaccaggctgcggaacaggttcggctcgcgggagcggccgcgctcgcgggcctggtcgtacatctcgcggtagacctgggcgcgatgcagggagtcgagcagcttgttgtagctgggcggcatctccaggctggcgagcacccggcggcgcagctcttccggccagtcggccggggccggctcgccgatcagcaggatcggcaggtactcgtcccaactggccagttgcttcagcaactctaccgccccgcccttcgactcgacgctgccgagcagcacgcacagggcttcgcgactgttgctcaggcccgccgctacctctcgccaatcctcgctgttgcaggtcagctgatcttcgccgaggaagttgagaatgactgccaggtcgcgactgcgatcgagattgtcgtcaatcagcaagagtttggtttcgcgccacattttgatcagctgccttgcatcgaatgggtctcgctcgacccgaaagagggctgggactaatgcctatttctaataagcagccagcatttggccactagttaagtcaaatgtgaacgattagtcaattttatggcgtgttttttttgctgtttccgacagggagaggcaataaaaaacccctacagaccgcatggaaagcagtactggcaggggttttgggggatatgtaaatttttccgaaaagccttgcgccaaagtaacggcacaaagccatgaaaaacttatccgaacatctggtagaccttggcgccttgcttcgactggttcagctggatcagatcggtggccagcttgcgctgctcgccctggcagacatcgatcagctcgcgatacagcgccagcagctcttccatccgcgcccgcaaggtggcttcgtcctgtacatcgagcatcgcctcgtcgacggcctggcggcaacgctggtcgagttcaccgatggcctcccagttctggctggccagggcaacgcgcagggcgctaccggtttcttcaaggatctgtacagctgcactcattgcttggtccctctggggatgcctctcagggggcaatcgcatcccaaccggatttgatgttgcgcaacagctcggaaacttcctcgagcttgcccgcgtcgttcttcaagttggcttccgtcaggcgcatcgacatgtaggcgtaaaggcggtcgaggttggctgccagctcgccgcccgcctcgaagtcgagcccttcgcgcaggccaccgacgatggcgatggccttgccgatcagctcgcccttcagcgccacttcgccgcgctccagggctccgcgggcctgcgccatccgggtcaggccgccttccatcagcatctggatcaggcgatgcgggctggcatcgatagcctgagcctgggtactgacattctggtattgccgcatggctgccattgcgttcatcgacggttgccttgttcggtgactgatacgctctatatcggtcggctaccgcgattctttagcgccgttcgctgtcttcgccctgcgcttcggcgctgccaatggcatcccaggcctgcttgatctggcccagcagcgcctcgacctcgtccagcggacgcggtgtgtcgtccagcgcgacaccagccaggcggcgggtcatgtagtcgtacaacgcatccagattgccggctatctcgccgccctgctggtgatcgaggccagcctgcaaggcgccgatgatcgacaacgtggtgcctaccgcttcgccgcgcagcgccgggttgcgctccagcaccgcgcgccgggccagggcgatgcgttcgagcgcgccgtccagcagaagcttgaccacttggtagggcgggacgtcctgtgcgctgcctacctgccggtaggtatcgataggacgcgacatcagcttttcttcacaaggccaggcaggctgctaagagcctgggccatgcgtccgctggtctggttgagctggccgatcaactggtccatggcggtgaactgcttgagcaaacgatcctgcaactgctcgacccggcgatcgagcgcttggcgctgggtatccaccgacttgatggtgtcctgcaatccatccaggcgctgctggagcacaccgccggtctgggtgtaaggcgtgagcttgtcgtcgagacgcttcatcaggccggtatcgccggtgaacagagcggaaaccgactcgaacttgtccttcagaaccttgtcgagtttcttgtcgtcgatctccagggtgccgtctttcttggtggtgatacccatgtcggcgagcatgcggacatcggtaccttgccccggctggaccatctcgttgcgcatggtggtgagcaggttgcgcacgctgctgtcaccgaccaaggcaccgaccacgggagccttgtcgtcgcccaccttggtcacgccggtcagttccgaagtcacgccgaccagcttgttgtaggcctcgacgaacttcttgatgttgtccttgacgccgccacggtcctgctcgaccgagatggtgatcggcttgttggtgtcggtgaccgtcttcagctcgaaggtgacgccgttgatgaccttgtcgaccgtattggtcggactttccagggtcaggccgtcgatgctgaacttggcattcttcgcctgggtgatatagccgctgctgctggaggacgtaccgtccaactgggacagggtcagcttgccatcggcgccgacgctgccgatgttgaagttctccaggccggaactgccctggacgaacacgtccttgccggcgccggaatccttgccggtgaagaccagtcgcgaggttccgtctccagggttgttgacgatgttggcggtgatgcccttgtccttcagctgcgcgttgagcgagtcgcgcacttcggcgagggtcgcgcccgccgcgacgtttaccgtgacaccggcatcgtcggcaccctgcttgatggtcagggttccgccggaagtggtcttgtagccatcggcaaacgacgcggtggccaccttgctgacgctggccagctgggtcacttcgagcttgtagatacccggcagggcgtccttggtggcggtggcggtggcgaacttctcgtcgctggtgctcgccgagcgcttctggaacagctcgggcttgttcagctccttgaggatggtctgcaggtcggagatcgcgctcttgagctggccgatgccggtgaacttggcggtggtgtcgctttccaggcgcttgagctgcgcctccttcggcgccttctcggccgccaccagggtggaaacgatgttcttgatatcaaggcccgagttgtagccgttgatcgtcgtactgttcgccatcttgcttcacctcgtcagctcattgacgctttgtccttccaattccaacagacagtcaaaagacgtgccaattccgctcaggcttccgccttgaacagcaggctgcgcgcttcgtccagtcgctctgccaggcgcagggcctcttcggaagggatttgccggatgacttctccggaagtcgaatcggtcaccttgaccactacccgccccgtggagtcgtccaggctgaaactcagatcacgacggatgctctgggtgaacttctcgatggaggaaaccgcctcctcgaccgcagcgcgttgctccttgtcgcccatcctgacgtcgcccgtccgttgcgcgcttgcgctggcggccgcctcgccggcctggccggccgggcgtgcgccatcggaagaagacgccgagccgaacagccggattaccggagcagccgtcgaattgttgacattgctgacgtccatcgtcgctacctctcaatgagatacgaggggaagcgcgccagcgctccccctcgtgacttcaccttgacctcgccgaagcttagcgcagcaggctcagaaccgactgcggcagttggttggcctgggccaggatcgcggtgccggcttgttgcagcacttggttcttggtcaggttggcggtttcggctgcgaagtcggtgtcttcgatccggccgcgagcagccgatacgttctcaccgatgttcttcaggttgttgatggtgttgtcgaagcggttctgcaccgcaccgaggtcggcacgctgggcgtcgatctgcttgatcgcctcgtcgatcaccagcacggcggactgagcgcccttcgcggtggagatgtcgatcttggcgacggtgtcgttagcctcggtgaacgtcgtggtgcctgccgcggtgcctgcgccggtgctgccggtgtcggtgatggctacgccggaaaccgcactggtagtaccatccgcactagccttggacacgtagctgatctgcgcgccgtcggtgaaggcaccgatgccgacgttggcgtcgttgaccgcagcggcgatcttggcagccgcctgctcggcggtttcgttgcccttcatgtcgaccttgacgttcacggcgctgccgccggtgatgccgatcgcgatgtcgacggtgcccgaagcggttgcagcagtgaccgcgccgccgccgtcagccttgaagtaggtgccgttcagcgactctgcgctcatctcgtcgatgccgacgctgatgatttcgttggcggccgaacccacctggaagctggcgacgccgaaggaaccgtcgagcagcttgcggccaccgaaggtggtggtgttgctgatacgatccagttctttctgcagttgcttcacttcgccgttcagagcggtacgctcggagtcgctgttggagccgttggccgactgcagggacaggtcacgcatacgctgcaggatgttggtcgactgctgcagggcgccttcagcggtctgcgccagggagataccgtcgttggcgttcttggtagccacgttcaggccgttgacctggctggtcagacggttggcgatctgcaggccggcggcgtcgtccttggcgctgttgatgcgcgaaccggtggacagacgctgcagcgaagtgttcagcgacgcggaagagttgttcaggttccgctgagtgttcagcgaagcgatgttggtgttgacggtcaaggccatcttgatgccctccaaggacgatatgtttgcctgagcttgcgacctcgggtgggcatcgcccaggcacccctaaagttcgcattcgtgatctttatcggcgcttccctggggagctttaggtttttttttgaccatcctcgtttttcatgcatcggccccgtcggaggggttcgcgcaaggcctcccgagcgctgcggacagcgacggaaagccccgccggccgctcagtccggcatccaggcacgataccaggcgcgcgagtgctcgccgtcgagcatccaatccgccagcacccgttcgcgcaggttatcccctgccctggccgcggcatccaggtcgcgggtatgcatgcggatcgcctccacccagtcgcggaaacggttcttcacccgcgtcaccggcagatcgtcctggtagcaacgcacgtcgctgcagaccaccgggaaaccgcaggcgccgtattccagcaggcgcagattgctcttgcactcgttgaacaggttctgctccaccggcgccagcgccaggtcgagatcgagagccgccaatgcccgcggatagcgttcgataggcacccccgcatgcacttccctgacgaagggacggatggacggcgggcacatgccgaagaacacccagtcgacttcgtcggccagttcccggaccacatcggcgatcagttccagatcgccggtatggctcgagccgcccgcccaaccgacacgtggccgctcgccgcgccgccgctccgcccgcagcccctgccaccaccccaccggcaggcggttctcgatcacccggatatccgggtggagaccggcgaaggcctctgccagggccggcgtcgacaccacgaagcggtcgacgtaacccagcccgcgacgcaacgtgcgcaaaatgtccttcggcaggtgctggcgatgggcgctcttgaggggcacgttgggcagatagtcgtccagctcgtagaccttgaaggcccgcgagaacgcctgcatccgccgcatggcctcgagacgctcctcgccgacctggcgctgcagcaccagtacatccgggtcgtagcgctccagatcggccacgtgcatcaggccgatcgacagcgcgccatcgatggatgccgactcgcgcaacgcgctgaacggctggatcacccggtaatggccgcagccgaataggtcggcggggtgcgccaggacagtgggcaagggccgccacccctgcaacgggcgccaggccagctgcgggtcggccagcttgaaaccgccttcggcctgcaacgaaaagcccgggttataggcgggatcgcgtgccaacaacggtagccagcgcgcgtacagcgcatcttcttcctcgacgctcgccgccgtcgtggcaggcgcatcgagcaacagccgcgcacgcggcgtccatacgttcaggtagcccgcctggaccgcccgcaggcagatgtcgacatcgtcccagcgcgtcagcgcctcgtcgaaaccgcccaattcgagaaacaactcgcggcgcatcaacaggcattcgccagccaccgccgagtagttctggtccacctgcaggcgctgcaggtaaccggcgtcctcgtgcgaacgcccttcgaaggcccgcccggccggtccgcataagccgagcagccagccggcgtggcagacccgtccgtccgccgccaggagcttggcgcctaccgcgccgacttccggacgctggccatggttgagcaactgctgcagccagtccttgtcgaggatgccgctgccggcatcgagccagagcaggaattcgccacgcgcccgggacgccgccaggttgcgcagagccccacgggataactgcccatcgcctcgcagcacccgcacctgctcgacacccatgccttcgacggcgagcagccattcgcgaacgtcggccgcttcgccaccctgttccagcagaaggatctcgtagttgggataggcggtattctccagcacggtttctacgcaacgctggagctgcgccaggcgctccccggccagcaccaggatgctgaccggcggttgcccggcgtggccgtagtccagctcgtagcgccccggcagccggcttccgactgtcgcctgcgcgtagccacgggcacgcaggtggccttcgatcgccgcacgctcggcggtgctgtcctgcaggcgcagcgctgggccagacagcagtggctcgctgatgtgtccgatacagcccaggccccgctgctcgacgagacgcaactggtaggccagctcgaaagcctcgccggcggtctcgtcgaatccgcccgtggcaagcagcggctcgcggcggaacaaccagtgccgggacaggccggcggggaaactgagcagaaggtcgagattcaggtccgggcgcaacgccgcgcccagctcgccgtcatccaggcgcatgagttcgtcggcgtacaccgcctggcagctctccggtgccgccagcaggtccagcgccgccaccagcaggccgctgacagtgaattcgacgcccgcttcgaccaggagcaaccagtcggtatcaagccgggcaagcgcctggttgatcgtcggtatcggccccgcggcaggatcgaagagcatcgctccgttccgcggactcgtgcccagcggcgcgaacaggtggctctcgacacgtggatacgaattgacgtgctccaggctctgcagggtacgctccacggcctcggtatcgccgtgggcatcgagcaccagcaccgcgaagcgcggcccaccaccctgctcctgcaggaatcgatcgatcagcaccttctgcaccgcatccggccgccgcgcctccagccaggtcgacagcgtgacgctaccgaagcccgccgcccgcctcagcgcggcgagcaggttgaccggcttgaagacacgggcgtccaggcgggtgatcggtgccacccggacgaagcggttgtcgccggcctggcgataccaacccagttcgcggatagccaggcggaagtcggcatggccctgctcgccgataccgggctggtcgcgcccgatctggctgaactgctggcgggagacgcggaaacgggtcagcggccgcgacaggaacgccaggtcgccacgctgtagcaactgcgcacacatggccaggtcgccgatccagtcgatggcccggccgttgagcatcatcaggcgctcgcagatctgcagcagcgcatcgcgccgggccatcaggcaactgggttcgccgatgaagttgatggtgtggtcggcgaggaacgagaccagctcgcgaccgtcgatcaggacgtcgccggcgaacgggaagcaggtcgccaggatgtccggcagcggctgcccttcctcgtcgatacgcaaccgccgcgacgaggccaggaccacgttcggctcgcgctccatcgctcccaccaacgcctcgacgcattcgggaagcaacacgtcgtcgtcgtggagaaacttgacgtactcgccctccgccaggcggatgcctttcgccgtgctgcccagctcgccgaggcgcgtctcgttacggaagtagcggatcgggaacgccgcggaggcgcgcttctgctcgaccagcgtggcgatccgctcgtcgctgctgtcgtcgcagatgatcagctccagggccggataggtctgcccgagcacgctgtcgagggcgtcctcgaagtactccagcttgtaggtcggcatgacgatgctgacacgaacgttcgcgctcattgagccattcctgagtaattggtgcagcgcatggtgatcggaagggccgggccatggcccttcgtgtcgccgctcccggtctcgactccccgcggcggagcatctgctccgacgagcgcgtcagcgcccttcacgaagagcatcgggccagtcgacatagaggatcgtgtcgtagaaatacagcgagtaatggcgcaggcgcagccgggctcccgcagcgatcccgtcgatcgcggcgacgatgtccagcaggtcctgcacatggtggtaacaggtgatggccatgcgcggccggcactcgtcgatcagccgcgcggccccccgcagaacccgtgcctcatggccttccacatccattttcagcaaggtcatgacatcgaggacatcgtcgagccgcacgcacggcacctgcacggtgccgtctatctcgaccctgcttcccatggtgccgtgggctgcgaatgcgagatggccgccggtatcggacaccgcctggttatgcagatggagaccgacacttccagcaagcgacgcatgcatgagccggtaattcgccggatcaggctcgaaggcatggatcgaagcatattcatgacgagccgccagcatgaacttcttcaccgtatcgccatcgtaggcaccgatatccacgtaatgctcgtcgcttcgcaagacgatcggatgctcggggccccggtacagggaaaagtattcctgctctcccggacacaacacgtccagcaacgcagcgcggttgccgtccaaacgcaggcgcatgatggcttccagggtcttccggcttcgctcgtcggccaggcgctcgcgcagcgagacgaactcggcgtgatgctgcatcgccaattcgcgagtcagcgcgccggtctggtagaccaaaggaatatccagcaggtagagaagctcgggcagatcgagggtgatgcattgcgcagtcttcgccaggtgatccagcgtcagccaggtaggcagcgaataggcacaattcaccgcgggtttccctgcgtggcatggttccttcaactgggcggtaggaatcacttggtcgaaaccatcgggaacgctattgctggcgaaaagcacatcgtccacagcaatcaggcgaaccccaggcagacgctgcgacaaaccggcaaccacctgtgagcggaacacccctccaagataggaagtaggcaccaacaccaatagatatccgctccgttcgcatcgcgaaaggaagtccgcctgcgtcatatcgtttcccgccatcatcgacagctccccgctcataggatgcgtgccccatcgggcatgagttcatcgtaaaaggagtaattaggcagttcccggggaagcctgcccggcaacaaccattcgcagtgtcgccccacccgggtgtcggcgagcgcgacgctgcccgcacccagcgtgctgccctggccgatctccactcgccgtcccaactgcacgccagcgagcagcgtgctacaggttccgacccggcagtcctcctccaccaggacctgcagctccagccaactgccagtgccgatgcgggcaggaccggcaagcacgcagccggcgccgacgaacacgttgcccagcagtcgcacgccttcgccgacgatggcctgaggcgagacgatatcgaatagccggtagcccgccaggcggatatccgcgatgagcttgtggcgggcgtagttcaccgcccgctcgtccagcgccacgaatacttcgctttccgcagcgggatagcgttcgagcagaggcgcaatatcgaagttgtgtcgatccgcagcattcagctccaggacccggtgttccagtccccgtgcccgcgcggtactgtccgcccgttcgagcgcgcgcccttccccgacgatgatcgcctgcttcatgccctctcccccagtacctgcgcgcgataccacagatgctggcgcaccaactgcacctcgtagtcgccgtgcatgaacggcggcgaatgtgcacccagtccctcctggaggcgttccaggaccagggtgtcctcgccgatcacgttacgctcgccgcgaatcagggtgctcagcaaagcgctgaaatcggtcttcggatccttgcgccgggcagtcatcatccacaggtggtagtcggtctcgccgggtgccaccggatcgtactgctggagcaggaagtgctcgccacggacgctgcagaagttcacgttcgggtagatgaaccagttgtagtaggcgtgctcgtcgccgtagccctcgcagaggtcggagaaccagctcttgtagggctggatcggcgccttggtggggaagctcagcgaacgcagctccggcgtttcgccttcctgcagcaggcgcagcacctcggatggcaccgcagcctcgcgtgccagaccgcgcaccggggcggtcatcaccgggaggaaggtcttcggatggacgaaaggaacatggttgtagtccttcacgttctccatgttcagcttccagttgtagcgcaccttgtggcagctgtagatcagccgcgtatccaagtgcgaggagacctcccgcaaggtttccaggaatccatcgtcgaactgctcgcgcagcggcagcgggtcgtccgccaggttgacgaacagcagttgccccacctcttccaggtgcagcttgcgcaagccgatccgcgcccgctcctcggcgctgaactggtacagactggagttcggaatgccctgtagctgcccctcggcgccgaacgaccaggcatggtacgggcagaccagcggtcgctggccggtgcattcggtctggatcgccgacagacgatgcggacactggttgagaaaggcccgaatgccggactcggtacgctgcaccacgaccggcacgccggcgatcttgcgggtgaagaactggttgcgctcgcgcaccatcgaactgaagccgacgaagatccagagcctgccgaacagcctttcgcgctccagcgcgagcgtctgcggctcggtgtagtgcgctgcgtccagcgcatggcgagtcatgtccacatccacaaccttcacttgctgaaaataacccgggccggattgccgaccacggtctgtccggccgccacgtccttgaacaccaccgcgcccatgcccaccacggcgtcttcgccgatactgacgtcgcgggcgatcatcgccccggagttgatcaccgcacgatcgcccaccttcacgtagccggccagcaggcagcgcgggccgatgtgtacatagtcgccgatgaccacgtcgtggccgagcatggtttgctggtcgatgaaaccgtaggcgccgatacggcagtccacgccgctgctcacgtcgtagccgaagaaggtcgggccgtagctggtccgcacgccaagggtgcagcgggtgcggatagcgacgaactcggcgcccttcgccagcaggcatgcgacctgcttctggcgactgagcggatcgccgaccgcggcgacgaacagttggtcaggctccgcgacgaagctctccggatacccgagccacgggtagtagagcgactccgcgaccgcgtcggggccgcgctcgtcgagaaacccgccgatcacccagtcgatgccgtgaccgtagtcgacctgcagctgggccagcacctgacgccccaacccaccggcgccgaggatgatgatcctcttcattgcatcgtcctcaactgatggtcaggccgccgtccatcaccagggtcgtgccggtcacccagcggctggcatcggaaagcatgaagatagcggcgttggcgatatcctcgggcttgccgaagcccatcgggtggttgctgcgttgaccgtccatcgaaccgaccgtctgggtggctgcatccagaagcggtgtttccaccagtgatggagacaggcagttaacccggatgttgcgcttcaccacttccatggccaggcagcgggacatggcgatcagagcggccttggttcccgagtatgcccccactccggcaaccccgatgtgggcggcgatggaagcgatgaacaggatcgaaccgccgggcgctaccaggttgcgcttgagcaacgcctgggtaagcagcatcggcgagtcgacattgatcgactggacttcatgcaagtgcgcttcggtcatcatccgcactggacacagacgggaaataccggcgctatgcaccagtccatggatttcgctgtcgacagccgctaccaccgcagcgcgctcctcggctacccgaagatcggcctggacagcacggtgcggcagctccgagatcgactgcaaggttgtcaggcatccatccaggcgggtctggtcacgtccggtaacgatcaattcggcgcccatccgcgcgcagctctgcgcgatggccaggcccaggccggaactggcgccggtgaccaggatgcgcctgcccgacaggctgaagggattgaaggaagtctcgtcgttcacttggctgattccgcgttcaaggcactcaggattcgatcagatcggggaacttcgccccttcgatatccaccaggcaggtaccccaggacaggccgataccgaagccgcagagcaacacgcgattgcggccggcctcgagttcccggttgatccgcgcggtcatggtcaccggcagcgaggcgccgctggtgttgccgaagtcgcgcagggtcgaaggcaccttctctaccggcaggccgagcttcttgcggatggtctcgttgatcatccggttggcctggtggaaaacgaagtagtccacttcgtccttgctcgcaccggcatagtcgagcagcttttccaccgccggcggtacgcgctgggtggagaagctgagtacggcggtgccgtcgagctgcaggtcgatggcacggtgccaatggtcgttctcgtcctcgcggaacggcatcaggtgctgcacgccgaccggttcgcgatggccgcccaccggcaggatgatggccttgtagccgctgccgtcgctgttcaggtcgaagtgcatcggcggcgcgccttcgcagaactccagcgccgtcgcggtgcccgcgtcggagaagatcggatcgttgacactggcgccgcggtcgccgaccagcacaaggcccttcttcaccccgccggcggcaatcagcgaacccagcaggttgagggcgaacggataggccgagcaacccaggttgacgtcgaaggccacggtggaatgcggcagccccaggcggtcctggaggatgatcgcggtagccggcgccaggtagtcgggagactgggtcacgacgatcagcgcatcgacctcctcgcgcttccactccaggctttccagcaggcgctcggcggcgtcgaaggccaggtcggagaagcactgccactcctgcgccatgcgccgcgtctcgatgccgatgttgcgcaccaggcgttcgcgctcggcgcgcaactgcggcttgcagtcggtcaggttggagataacgcgcttggggacgcaggtcgccatcccggcgaaacggacgttcttcagcgtggaggtggccatggtcagagtccaagcatctggtagaggtcgcccaccgtgcgagccttgatcaggtcttcaccggtgatggtcttgccgtattccatgtcgaacatgacgatgaccccgagcgcggccagcgagtcccattccggcaggtcttcgagctgggtgtccatgctgacctcgacgggattctggaaatcggtggcggaaaggaagtcttcgatgaattttgcttggctcatttcttgtctacctgagtgaggcggttgttcattctgttatcggtcgcgacgggctcaacttgatgctcgccgccgcggcatggcggcggaagcgatcaggccggcgacgaactcgacgtctgcggcggccagcccgggatagatcggcaggcacagcacccgcgaggaaatcgaccgcgccaccggaagattggcgggcgccgccgagggcagcgaatggtacatggggaagtcgctgatgagtgggtagaagtagcgccgcaccagcacatccctgtcgcgcaggcgctggtacagctcgtcgcgcgaaagcggaaaatcgtcttccaccaggatcgggaaataggcgttgttggcgaaggtctgggtaccaggccggaggcactggatgccagggacgccggccagcaggcgccgatagcgctcggcgatctccctgcgctgctccagggcctggtcgacgtgcttgagttgcagcagcccgaaggcagcgccgacctcgttgagcttgccgttgatgccgggcatgaccaccgtgacctcgtcgacgaagccgaaattcttaaggtggttgaggcgttgccgggtgttttcgtccgagcagatgatcgcaccgccctcgaaggtgttgaacaccttggtggcatggaagctgaggatgctcaggtcgccgtggcgcagcacgctgccgccggcgtcgcgcacggcgaaggcatgcgcggcatcgtagatgaccttcaggtggtggatatcggcgatccgctggatcgcctcgacatcgcaggggttgccgtagcaatgcaccggcaggatcgcggtggtctgcggggtgatcgccgcctcgatccgcgacgggtcgagattcatggagtcctgatcgatgtccacgaagatcggcttgagcccgttccacagcagcgcgtggctggtggcgacgaaggagtacggcgtggtgatcacctcgccggtcacccgcaatgcctgcagcgcggtgatgagcgccagggtggcgttggcgaagagcacgatgtgcttcacccccaggtattcgcacagggcctcttccaacgcatggtgcatgtcgcccccgttggtcaggaagcggctctcccagatcttttccaggtaggggatgaactcttccaggggcggcagcagcgggctggtgaccgggatcgtcttgttgttcatgtagggccctgatgaatggatactcaggcgagtaaagggcgaaaaacccgagcacgccactctatgcaaggcccgtacccaaagagcctgatgcaggtcaaagcccctggtcgcgcggcccctggctgttccacaggcgctgcggcgcgaatcggcagtcaaacttctgacaaattctcccgtgtttccgtagaccttgcggaacataccctccagcgacacaggtccagtccctgcgaacgaaaaggcccatgacggagtcatgggccctatttcacagagggactgtcacttcaggtagttgaacaggctcaacccctggatcttcacgtagctctgctgcgcggcatccatgatggtggactgcaacgacagccgcgacaacgcctcggcgtagtccaggtcctggatctgcgacatcaccgacgcattcaccagcttcacatcgtcgatgaaggtctcggtgctttccacggtattcaggcgcgcgccgatcttgccctggccgccatccacggcggcagccacggcggagaggttggtcagggccaccgccgtcgcatcgcggatggcgtcgttgccggcctggttgtcggtggagctttccagggccttgcgcaggtccgacaccacgttcagcaggctgcgcttctcgctgcccggcttgtagttgacgttgaactcgtcgcccgccttcggcgtgccgtcgatcgtcacgctgacgccggcgtagagcaccttgtcgatggtcttcgggtcgtcgtcgatggcgcccttggacaattgccaggccggcggcgaattcggatcgtaggtggtccagtcatagcccggaggcaggctcttcggatcgtagaccacatactccttgtcgctgacgaagtggatgttgaagccgtcggttgccgcaggcggattgctcgccgggaactggctgtcgaaggccagctcgtcctcgaccaggccgaccgagatgcgaccgtcgccggtattgccagccgccgccttggtatcgagacgagcggcattgacgatgtcctcgaacagtaccttgccgctgtcgctgaccggaatccgcgtgctgctggcgatctgcacctcgcgctggctctcgtcgcccatgtagctgtaggtgccgtcctcgttgcgcacgaacggctgcaccgagccctgggacccggaaaacaggtatttgccactcgcgtcgcggctgttgagcaggttcagcaactcgtcctcgcgctggcgcaactcgctggccagcgacttcttgtcgttggagtccagtgcgccgtcgccggcctggccggcgatctcacggatgcgctggaggacgttgccaaccgaacggaggatggtttcttcctggctcaggctgttcttcgcctcggtcatgccggtcttgtactgctcgttcaacccctgctcctggtccaggcgcaacaggcgtaccgaaccgaccgggtcgtccgccggtgtcaggatgcgcttgccggtgctgatctgctcgaaggtacggttcaggtccgcgtagttgcgggaaatcccgttgaccgagttgttgaaggcctggatggtggaaatgcgcatggtggcggtctcgctggcttaggccccgtcgagagaactcaacggaacgctccaatcagggtatcgaacagagtgcgggcaacttgaatcacctgggccgaggcaccgtagtactgctggaactggatcaggttggccgcctcttcgtcgaggctcaccccggacaacgaatcgcggctgccctgggcctgcttcagcaccgtggcgctggcctcgctgctggcacgcacctgggcggtcagggtgccgacccgctcgaccaggccaccataggcctcgttataggtggaaccggtgttgtcggtgccgccgacggtcggcttggtctgcaaggccagcaggttgagagcgttgcggttgtcggaaatacccttgtcgttgaagcccagcttgaagctgtcggagttctgcggtacgccgctgagctcgaattcgtagctgtatttctgcccgctcgggtcggtgaacgccatgcgcacggtattggtattgccgctggtcagcgtcgggctgccggtcagggcgttaccgtccttgtcgacgtagctccagccggccggcaacggcgaggacagggtataggtcttgccgtcggcgctgagcgtcgcgcccaggctgatcccgttgggcccgaacgcgccctgtagcacagtcggatccaccggcgacggaccgctggtgagggtcggcgcgccgatcttgccggtgccgcggttttcggtggtcgactcggtacgcgcggtaccggcgaacgccagttgcgaggcattcttcagcgtcgcctcgatatccgccgcgccacgccgggtcggctgcagggtgaagcggtcgccggcagccgggagctggtcgagggtcaggttgaagccctggtcgacgccgttggcatccttgaacgagagggtgtagggaccggtaccgctgaccgtgacctgcatgcttgcgtcgtcgcccaggcgccgcgcggtaaaactggtgccgtcgaagtccaggcggaaatcgctggagttcagcttgctggtatcggtgatgttcaggttggcgtggacattaccggtgttgccattcttcgccaggacccgcagcgcggtgatgtccggatcgttgatgtcgccgaacaggttggcgccggccttgccggccaggtcgaggccctgccccagctgcttgttgatggtatcggcgagggtgatcgccaactgcccgagcttgttgtagctgctgtccagggcgctgttgcggtaggccagcaagccacccatctcgccgccggacaccaggccggtgacgttctgtatggagttgccgttgctcagttgcacctggtagcgggtagggtcatccagcccgggcaccacgctcagggtcgacacggtattgcccaccaccagcggctggccgctaccgatgaacaggctgacgctgttgtcgtcctgggtgaccgcggtcaccccgatcatctcggacagcttgcgcacggcttcgtcgcgcgcatccatcaggtcgttgggcaccgcgcccgccgacttggccttggcgatggcatcgttgtagctggccacgctctgcgacagatggttgacctgcgaagccagcgcgcccagttgctggttgatcaggctgttctgcttgtccaactggtcgtagagggtattgaaggtcttgcccagcccctcggcctgggcaagcactgcctcgcgcgcttcggtcgaggagggattgttggcggcggcctgcagtgcggcgaagaagcgctgcatggccgggctgacgccggtggtggtgttggacaacaggccgtcgagctgctcgatctggctacggaatgcgctcaactcgctgttctggctggtggcgttgcgcaactggccggtgaggaagtcgctggccaggcggcgcacgtcgacgatctggctgcccgagcccatgtagccggcaccgctgaactgcgggacctgggtctgctggatggcatcctggcggctgtagcccggcgtcttgacgttggtgatgttgtgcccggtgacagtcagccaggtctggctggtgccgaggccggacaggcctatcgagagtaggtcggacatgggtcagttcctccttgctcaacccagaggcggcgtgccggcggcggcgacggcctggtaggtctgcatctgtctggcgatctgcgccaccttgcgggcgtactgcggatcggtggcgtagccggcgcgctgcagttcctgcatgaagcgctcggggttggcggcgctgtccagggcgttctggtagcggtcgttgccctggaggaagctgacgtagtcgtggaagctctgctcgaacgacgagtaggagcggaacgccgcgacttccttgaccgccttgccgccttcgtattcggtggtgagagcgcgcgccgaggcaccatcccagcggctgccggtcttgatgccgaacaggttgtggctgctgccgccatcctgctggcggatgatcgatttgccccagccggtctccagcgcggcctgggccaccaggtagcgggcatcgacgccgatccgctcggcggccttctgggccatcggcagcatggtggcgatgaactcgtcggccgaggcgaacatcgacttgcccctggccagcggcggctgggcgatgcgccggctgccctggctgtcgacgccatcggtggagaaaccgcggcggctcgccgccgggtagctctgcgccggcaggtagctgtcctggcccaggctctgcatctggctggcggccggcgaggcggagggaacgatgccggcgagcatgcgctcggtcagcttgcccggcagcgccaggcgcctctggttgagcagcttcgagtcgtcgcggccggcttccggcatcggcagggccttgccggcctgcgcgctggggttgctaggccagcgaccggcgccgttctcggcgacccgggcgaacgggttttcgccgttgcccctggagccttgcttcatcttcgacaactggcgcaccagcacgtcggccaggccgatgccgccggcattcttcgacaggctcaccgacagttgctggtcgtacatgtcctggtactgcttggtggtctggctgttcatgaaattgccgtcgcccagcgcttcgttggccgaacgcatggatttgagcatctcgttgaggaacagcgattcgaattcctgggcgaccttgcggatgttcgcctcgccgtcgcggtccttgccgaccttgagctggttgaggcggttgagatcggtataggagccgctgtcggggcctgcgccgataccgctgagcaaacgggaatccatggcgtcgtcctcagatcacgatcaggtcggcctgcaacgcgccggcctgcttcagggcttcgaggatcgccatcaggtcgctcggcgcggcgccgacctggttcaccgcgcggacgatgtcgtccagggtggtgccgggaccaaacttgaacatcggcttggtctcctcctcggcgttcacccgcgagcgcggcaccaccgcggtctggccgttggagaaggcaccgggctggctgacgatcgggtcctcggtgatgctcacggtcaggctgccgtgggtgacggcggccggcgataccttgacgttctggccgatgacgatggtgccggtgcgcgaattgatgatgaccttggccaccgcctcgcccggctgcacgtcgaggttctccaggatcgacaggtagtcgacccgctggttcggatcgagcggcgcgctgacccgcaccgagccgccgtccaccgcatgggcgacgcccggaccgagcagttcgttgatgcggtcgacgatgcgcttggcagtggtgaagtccgggcggttgaggttcagcgtcaggctgttgccctggtcgaagccgctcggcaccgcgcgttcgacggtggcgccggccgggatacgtccggcggacggtacgttgacggtgatcttcgagccgtcgcggccttcggcgtcgaagccgccgaccaccaggttgccctgggcgaccgcgtagacctggccgtcgatacctttcagcggagtcatcagcaggctgccgccgcgcaggctcttggcgttgccgatggacgacacggtgacgtcgatcggctggcccggcttggcgaacggcggcaggtcggcatgcaccgataccgcggcgacgttcttcaactgcacgttgccgacgttggccggcaccttgatgccgaactgcgccagcatgttgttgaaggtctgcagggtgaacggcgtctgcgtggtctggtcgccgctgccgctcaggccgaccaccaggccatagccgatcaactggttggtccgcacgccctggatgctggcgatatccttcaaccgctcggcctgggccgcgccggcggccaggagcagcgcggcgagggccagcaggtgcttgaacttggtcatcgcgagcgtcctcagaacggccacagcgggctgaggaagaagcggtccagccagcccggctgactggcatcggcgaaggcgccggtgccggaataggtgatccgggcgtcggccacgcgggtcgaggacacggtgttgtcggtggcgatatcgtcggcgcggaccaggccggcgatgcgcaccagctcgttgccggtgttcagggtcatccacttctcgccgcgcacggagaggatgccgttgggcagcacctcggccacggtcacggtgatcgagccggtcaggctgttgctctgccccgcctggctatcgcccttggcgtcgcgcgagccgccgtattcggcgctgaggctgaggtcgccgccgccgatcgggttgttggtggtcatgccgctgccgaacagcgaggtcagccccatcttggtcttgctgtccttctggatatcggagttggctttcttgctcgcctgggtcttctcgttgagggtgatggtgatgatgtcgcccacgcggaaggccttgcggtcgtcgtagaggttctgctcgaagccggcctggtagatcgcgccgttgttctgcgcggcgggcagcggggtgcgcggcagcaccggcgcgtagtacggatcgttcggcttcggcggtggattgacgcaaccgcccagggcggtggcgatgccaagcagggagacgatcatcagccggttcatatcaagctacctcgcggcgtacagccagggcccggtcagggcccgtcaaagattctgggtgacgaaggacaacatctggtcggcggtggagatgaccttggagttcatctcgtaggcgcgctgggtggtgatcatgttcaccagttcctcgaccacgttgacgttggagttttccagggtgttctgggcaaccgtgccgaggccgttgagacccggcgtaccgacctggggcgcgccgctggagccggtttccaggaacaggttgttgccgatggcctgcaggccggccgggttgatgaagtcggcggtctggatgttgccgatcacctgcggctgggcgttgccggtggtggtcaccgagacggtgccgtcctggccgacggtgaaggtctgggtctcgttgggcaccacgatcgctggctccagggcgaagccgttggaggtgacgatctgcccgtcggagttcaggtggaagctgccgtcgcgggtgtaggacacggtgccgtccggcagcaggacctggaagaagccgcgcccgttgaccgccatgtccagcggctgctcggtggtctgcaggctgcccggggtgaagatcttctgggtgccgacgacgcgcacaccggtacccagttgcaggcccgaaggcagctcgctgtcctgggtcgactggccgcccggctggcgccggatctggtacagcaggtcctggaactccgcgcggtcgcgcttgaagccggtggtggatacgttggccaggttgttggaaatggtggtcaggttcatgtcctgggcggacagaccggtcttgctgacccacagtgccgataacatcgtcgtgctcctcgggtgccggttttatggcaccacgctcaagtgattagctgatttgcaaaacccgcgccatggccgccgaatcgtcctcggcggtgcgcatcatcttcacgtgcagctcgaattgacgggacagcgagaggatcgcggtcatctcttccaccgcgttcacgttgctgctttccaggaaaccggagaccaccttcacgttggcgtcggccagcggcgcctgctcgcccggctgcggcttgtagtgcagcaggccgtcggtacccttctccatctgcttcaggttcgggttgaccagcttgatccggtccaccacggcgaccacgttggggttctcgccaagggcgcggatgctgatggtgccgtcctggccgatctccaccttttcctccggcggcacggcgatcggcccaccgttgccgagcaccggcaagccatcgccggtgcgcagcatgccgagggcgtcgatatgcatgccggcggtacgcacgtaggcctcgctgccatccggcgcctggaccgcgacgaagccgtcgccgtcgatggcgatgtccagctcgttgccggtttcctggaggctgccatggctgaaatcggtaccgggccgctcgctcatggcgaatacccgcgccgggaagctgtcgccgaacacctgcatcgaacgcgcctgctcgaagtcgcgacgaaagccgctggtcgagatgttcgccaggttgttggcatgagcacgcatcgccagggtgttctggctggccccgctcatggagacgtacagcatcttgtccatcgaatcctccaggcaccggcacaatccgccgggctttcttgcaggttatccagcaagcgccgtgccagaattcgaaaaaacaattaatacattgatttaaaaggattttataaaacagaaagcctcctttcggaggcttcgggggcaacccctggccaggggttgccgctggcggcaagggccttgccggtgcccggacggcaccggcacgccgtcatcagcgcaggttgatgatggtctgggtcaccgcatcctcggtctggatggtcttggcattggcctggtagttgcgctggtggacgatgaggttcaccagttcgttggagatgtccacgttggacgcttccagcgcgccggattgcagcgcccccagggtgcccgagcgcggcgcgccgaccgccggctcgccggactccgaggactgcacccaggaggtcttgccgatcggcgtcaggccctggatgttggcgaagttggccagcaccacctggccttgcaccttggactggccgttggtgtagcgggcgaagatcaccccggtgtcgtcgatttccaggcctgccagctgaccggtggtgtagccgtcctggatcgggttgctctgggcgaacgcggtggagtactgggtggtcttgcgcatgtcgaaggaaatgccgctggcggcaccggtcgcgccgttccaggcgtaggtcggcggggtcttgccgtccgaggccgccggaatccagccggtgccgggagtcggcggattgccggtggccgggctgaactggatcacgttggtggtcgcgtcgatgctgaagcccggcccgctggtgctgccgtccggcgcccgaaccgaggtcatctggccgctggcgtcgaaggtgacgttgaagctcatcggcgtcttgttcgacggatcgagcggattgacgccgtcgatcagcactttcatggtccagctgttctccggaatcggcggggtcgcattcgggtccggctcgttcttgatgaagaactggctcatggtgtgggagttgccctggctgtcatagatgcccagcgaagaggacgagttgtaggtagcggcgtcggacggatcgaacggcgtcacggtcggcggcttcagcgtcgagttgaggttgtacgactgctggatgctcgaggtggcctgcggcgcctgattggcgcgctcgaccttgaggtcggtgaccacgccgttctgcaactggccgttcggcccgacggcatagccctgcaggcggtagccgttgttgtcgacgatgaaatcctgcttgtcggtattgaagtagccggcgcgggtgtagctgatcgccccgttgttgctggtgacgaagaagccgttgccgttgatggccaggtccagcacgctgttggtcgagtcgatgttgccctgcttgaacatctgcgagacgtccgagagcagcacgccgctgccctgcgggttgctgcccgaacccagcaccgaggcggcgtagacgtcggcgaactccgcgcgggattgcttgaagcctacggtgccggcgttggcgatgttgttgccggtgacgttcaggccgctggaggccgcctggatgccgctcaggccgatgttgaaactcatggatagctccttgccggaaacgccggcttactggccgatgatctgtactttggacagcgcgatgctgcccaggcctgcgaggttgagcatcagctcgccgccgttctgccccagggtgacgctgtcgacgttggccggcaggtaggtctggagcccgtaggtcttgccgtcgatcgaggtctgcgcctcgaacttgtaggtgcccggcggcatgatgttgccgctgctgtccttgccgtcccacatgaagctgacgctgccggcagcctgctggccgaggttgatgcgattgaccacggtgcccttgtcgtcgtagacgttgacccatacgttgctgctggagaccggcaggttgagggacgccttgaaggtgtccttggtgtccaccaccgacttgtcggtcgccacgatgaccttccgccccaccagcgacgaggcttgcagggcctgcgacgactggtagttggagagaatgctctccatgctcttgttcagcgactgcacgccttccacggtgctgaactgggccagttgggcgatgaactcgccgttctgctgcggcgacatcgggtcctggttcttcaactgggccaccagcagcttgaggaattcgtccttgccaaggttgctgctgcccttgacgctctgcccggtctcggtggcgccgctgccggcggcgcgcttgctgccgttgacgttgccggtgttgctgctggtgccgctgacgttatcgatgctcatgctctactccgctcactgacccagggtcaggaccttctgcatcatctgtttggcggtattcatcatttccgcgttggtctggaaggcacggctggcggaaatcatgtcggccatttcctcgaccacgttcacattggggtaatacacgtagccgttggcatccgcggccggatggttcggctcgtagcgcggcatcagcgaactctggtcctcgacgatgcccagcacctgcacgccggcgccggagctgtcctggtcggcgaacagcgagccgctgtcgccctgggcctgctggaacatggtggagaacaccggatggcgggcgcggtaggtcttgtcgacgctggaggaaaccgtctcggcgttggcgatgttgctggccacggtgttcaggcgggtgctctgggcgctcatgccgctaccggcaatgttgaagacactggcgagggacatggcggttactctccacgcagggcgctgaccagccctttgaatttgctgttgaggaaggtgaaggacgcctggaagtgcatggcgttctcggcgtagttggcctgctcgatctgggcgtcgacagtgttctggtcgatcgacggctggaccgggatgcggtactgcaggctgccctcgcccatgccgaaaccttcggcggcgatatgccgctcgttggtggtgcgggtggcgaaggtacccttggcggccttgtccttctgctcggcgagaaccgcggcgaagtccaggtcgcgagccttgtagttcggggtatcggcgttggccaggttgttggccagcacttcggcgcgctgggcgcggaagctgagggcctgctggtggataccgagtgctctgtcgaaactgatgctcatggctgcgaacctgtttgccggtgtggctttcgtcgccaacacttcagcaaggcccgtgccaaattattaaaaacctttatattcaataacttgagtttatttaagggtaacccggaagcggcaagcggcaagccgcttccgcttgccggcaagggtggcaagcccctggaacggcttctccggcaaacgaaaaaaggcccgatatcgtcgatatcgggcctttcccatgcttccggccgccggggacacggctcactcgtggcgaatgatccgctcgagatccaccggttcgccgggatgggcatgcagcttggcgcgaatgtcctcgaacatcgcatcgtattccttgtgcacccgggtgatcgcgccgaacttcgggtgcaggccgtgcttctgggcgacccgcgtggcatcgctggcgaagttgaaggcggtatcgcgcggcagctcgaaggagtcgctgaacggcttgccgtcgatctcgccgtccatgtcgaagtgcacataggcgccggattcggcgttctgccgcacctcgtagcggatatggatattgatgtcctgctggtcgaggccgggcaggctgaccagatggaggtggcctggttcgaacatgacgaatctcctggtgggaatcggaatcagtctagccagggtcgagcgaaagaaaaccgccctggatcagtgcaacgtcgctttttccgcgcgttcctgaatgaccacccagggcgccaccaccaccgcccagagggtcgggtcgcgttcgaggaagtccttggccgcatcctccccgaccttgctcaggccgccgccggaaagccaggcggcgaccttctcgcggtcgtccccggccagggcctcggcgacttccaccaggtccagcgcggcatcgacctggagcaaggcgccacgggcgaagaacggttgcagctcggcccaggaaatgaccgcggtctcaccgagcagcttggcatagagggtgctagtttgttctgtcatgggatctacctggattgcatgggcgccatgataacgcccgccggtagcccacgacagccgaagggaaaccgggcccagggaggtgaggcaggtccgcgccgtttttctatacgtttatgtcaaccaggcgacacgactcacgggagctcgccgtgccgtgcttttcaagcgacgaagcgccgctctacactgtaccggtacagttcccggggtccgtccatgacgatcacccggtctcctccggcccccgcggccgcgagactacaacaatgacaacacacaagaagagtggagcactatgaagaagggtactcagcgtctatcccgcctgttcgccgcgatggccattgccgggttcgccagctactccatggccgccgacaccatcaagatcgccctggctggcccggtcaccggtccggtagcccagtacggcgacatgcagcgcgccggtgcgctgatggcaatcgaacagatcaacaaggcaggcggcgtgaacggcgcgcaactcgaaggcgtgatctacgacgacgcctgcgatcccaagcaggccgtggcggtcgccaacaaggtggtcaacgacggcgtcaagttcgtggtcggccatgtctgctccagctccacccaacccgccaccgacatctacgaagacgaaggcgtgctgatgatcaccccgtcggccaccgccccggaaatcacctcgcgcggctacaagctgatcttccgcacgatcggcctggacaacatgcagggcccggtggccggcaagttcatcgccgaacgctacaaggacaagaccatcgcggtactgcacgacaagcagcagtacggcgaaggcatcgccaccgaggtgaagaagaccgtggaagacgccggcatcaaggttgccgtcttcgaaggcctgaacgccggcgacaaggacttcaacgcgctgatcagcaagctgaagaaagccggcgtgcagttcgtctacttcggcggctaccacccggaaatgggcctgctgctgcgccaggccaagcaggccgggctggacgcgcgcttcatgggcccggaaggggtcggcaacagcgaaatcaccgcgatcgccggcgacgcttcggaaggcatgctggcgaccctgccgcgcgccttcgagcaggatccgaagaacaagaccctgatcgacgccttcaaggcgaagaaccaggatccgagcggcatcttcgtcctgcccgcctactccgcggtcacagtgatcgccaagggcatcgagaaagccggcgaggccgatccggagaaggtcgccgaggccctgcgcgccaacaccttcgagactcccaccgggaacctcgggttcgacgagaagggcgacctgaagaacttcgacttcaccgtctacgagtggcacaaggacgccacccggaccgaggtcaagtaagcatcgttgcagtacggagcccacgtcacccaccgtgggctttgttttagtacccgcatgattccgcgagcggcggcccggcaagggcaggcgaagaccggcagcgttcactcctggtggacgggagcgcggctttcccctgcctcccgccggccagccgcgcgccggatcgtgacgggtctcagcagcgttccggccccacacccgcgagccgaacgtctacctgccgtacaacggcgggcgtttagcgagagagtcccatgcccgagatttatcattacctacaacaattggttaacggcctgaccgtcggcagcacctatgcgctgatcgcgatcggctacaccatggtctacggcatcatcggcatgatcaacttcgcccacggcgaggtgtacatgatcggctcgtacatcgccttcatcgccatcaccctgctggcgatgatggggctggacagcgttccgctgatgatgctcgccgcattcgccgccagcatcatcgtcaccagtgctttcggctacagcatcgagcgggtcgcctaccgcccgttgcgcggcggcaaccgcctgatcccgctgatctccgcgatcggcatgtcgatcttcctgcagaacgccgtgatgctctcgcaggactccaaggaaaaggccatcccgaccctgctgcccggcaacttcgtgttcggcgaaagcagcatgaacggcgtggtgatctcctatatgcagatcctgatcttcgtcgtcaccttcctggtgatgttcggcctcaccctgttcatctcccgctcccgcctgggccgcgcctgccgcgcctgcgccgaggacctgaagatgaccaacctgctgggtatcaacagcaacaacatcatcgccctcaccttcgtcatcggcgccgccctggccgccgtcgccgcggtgctgctgggcatgcagtacggcgtgatcaaccccgggatcggcttcctcgccgggatcaaggcgttcaccgccgcggtgctcggcggcatcggtagcatccccggcgccatgctcggcggcctgctgctgggcgtcgccgaagccttcggcgccgacgtgttcggcgaccagtacaaggacgtggtggccttcggcctgctgatcctggtgctgctgttccgacctaccggcatcctcggtcgtccggaggtggaaaaagtatgagccagtccctcaagcgcgcgctgttcagcgccctcctcgtgatcctggtgtcctatccgatcctaggcctgaagctgcgcaccgtcggcatcaagctcgaggtcctcggcgccgatgcgcagaccctctggaccatcgccgcggccgccctggccatgttcgtctggcagctgttccgcgaccgcatcccgctcaagctgggtcgcggcgtcggctacaaggtcaacggcagcggcctgaagaacttcctcagcctgccatcgacccagcgctgggcggtcctcgccctggtcgtggtggctttcgtctggccgttcttcgcctcgcgcggggcggtggacatcgccaccctgatcctgatctacgtgatgctcggcatcggcctgaacatcgtggtcggcctggccggcctgctcgatctcggctacgtcggcttctacgcggtaggtgcctacacctacgcgctgctcgccgagtacgccgggttcggcttctggaccgccctgccgatcgccgggatgatggccgcgctgttcggcttcctcctcggcttcccggtgctgcgcctgcgcggcgactacctggcgatcgtgaccctcggcttcggcgagatcatccgcatcctgctgcgcaacatgaccgagatcaccggcggccccaacggcatcggctcgatccccaagccgaccctgttcggcctgaccttcgaacgccgcgcgccggaaggcatgcagaccttccacgagttcttcggcatcgcctacaacaccaactacaaggtcatcctgctctacgtggtggccctgctgctggtgctgctggccctgttcgtgatcaaccggctgatgcgcatgccgatcggtcgcgcctgggaagcgctgcgcgaggacgaagtggcctgccgcgctctcggtctcaacccgaccatcgtcaagctctccgccttcaccatcggcgccagcttcgccggtttcgccggcagcttcttcgccgcccgccagggcctggtgacgcctgagtccttcaccttcatcgagtcggcgatgatccttgcgatcgtcgtgctcggcggcatgggttcgcagctcggcgtgatcctcgccgcggtggtgatggtgctgctccaggaaatgcgcgggttcaacgaataccgcatgctgatcttcggcctgaccatgatcgtgatgatgatctggcgtccccagggactgctgccgatgcaacgcccgcacctggagctgaagccatgagccgaccgattctcgaagtgagcggcctgaccatgcgcttcggcggcctgctggccgtcaacggcgtcaacctgaaggtcgaggaaaagcaggtggtctcgatgatcggcccgaacggcgccggcaagaccaccgtgttcaactgcctgaccggcttctaccagcccaccggcggcctgatccgcctcgacggcgaggagatccagggcctgcccggtcacaagatcgctcgcaagggcgtggtgcggaccttccagaacgtccgcctgttcaaggaaatgaccgcggtggagaacctgctggtcgcccagcaccgccacctcaacaccaacttcctcgccggcctgttcaagaccccggcattccgccgcagcgagcgcgaggccatggagtacgccgcgcactggctggaggaagtcaaccttaccgagttcgccaaccgcagcgccggcaccctcgcctatggccagcagcgacgcctggagatcgcccgctgcatgatgacccgcccgcggatcctcatgctcgacgagccggccgccggcctcaacccgaaggagaccgacgacctcaaggcgctgatcgccaagctgcgcagcgagcacaacgtgacggtattgctgatcgagcacgacatgaagctggtgatgagcatttccgaccatatcgtggtgatcaaccagggcgcccccctggccgacgggacgccggagcagatccgcgacaacccggacgtgatcaaggcttatctgggggaagcgtgagcatgctgagtttcgacaaggtttccacctactacggcaagatccaggcgctgcacgacgtcagcgtggaagtgaagaagggcgagatcgtcaccctgatcggcgccaacggcgccggcaagtcgaccctgctgatgacgctctgcggctcgccgcaggcggccagcggcagcatccgctacgaaggcgaggaactggtcggcctgccctcctccaccatcatgcgcaagagcatcgcggtggtcccggaaggccgccgggtcttctcccgcctgacggtggaagaaaacctggcgatgggcggcttcttcaccgacaaggacgactaccaggtgcagatggacaaggtgctggaactcttcccgcgcctgaaggaacgctacgaacagcgcgccgggaccatgtccggcggcgaacagcagatgctcgccatcggccgcgcgctgatgagcaagccaaagctgttgctgctggacgaaccttcgctcggcctggcgccgatcatcatccagcagatcttcgagatcatcgagcagctgcgtcgcgaaggcgtcaccgtgttcctcgtcgagcagaacgccaaccaggcgttgaagctcgccgatcgcgcctacgtgctggagaacggccggatcgtcatgcacgacaccggcgccgccctgctgaccaacccgaaggtgcgcgacgcctacctcggcggctgagcaccgtcccgccggagacttcagcgcatacgaaaacggccctcacgggccgtttttttatgccgaggcgtaccggctacaggccgtagcgctcgatagcgtccaggtgcggctgggtgtcgacctccgccgcttccgccaggcgcagccagcacatgcggtgcggccattgcccggtggcctcctgcaacgcctggtgcaggtcgcgcggcgcctgctgcgcgggtgtcgcgacggtgaagtagatcgcccgcagttcctcgccgctgctggcatcggtgacctggtagtcgcggttgctgtgcacccagaccttccagccgcgcgcgtcgagcatttcgcggaaggcgtcgaaggcctcgtcgcccggatagacgccgtccaccagccagctcggcgagtaaccaccgctctcgaggacgtgcaccaccgcataggtgggaacgaaacgcttgcgttcctcctcatcttccggagccggatagatcaggccggcgtcgaacaccacccagtcaccgacccgctggctgcggttgcccggcgcgttctcgaggacccgcgcggtcaccgggccggtgcgccgggcgtagtagtcgagcgcttcgccatcctcgatgtaacggacgatcacccagccccagtcttcctcgatcggtccgtcgccggcggcgaactccatgcccatgccagcagcgacctcgcgcagcatcgtccagtcgcgcgcggcgctggcggcggtcatctggtcccactgcaccgactgcggctcctccagcttgccggccagacgctggtaggccagcgccgcctcggcgaagcgatcctgctccatcagcgccttacccagcaggctgtgggctcccagcgagccgggagaaatttccagcaccgattggcaggcgcgctccagctccggccagtcgttgagtttctcggccagcttgacttcgctccacagcgcgatcagcggcacgctgtcggcgtagagccggccgaggcgcttgacctggtcgtactcgccgcgggccagcaaggcattgagcaggtagtaggccagttgctgctcctcgccggtgtggcgctcgacgtactcccaaagcaggtcgatggcctcgtcgtcggcggagcaggcctgtagcgccgaggcggccacttcgcgcaaggcggtgtcgtcgggccgctcggccagcgcctggagcagccactgcacttctttctccgggttgcgcggcgcgtcttcgctgccctgcgcagccagccagtcgagcaactccgcagccggcaccggcagctcctgctgctgcggcgcggcatcgatctcctccctcaacccggcgagcaactggctggcgccccgatcgcgctgcaactgttgagcatgctgttcggccagcgccaggtggcgcctggcgctccataccgaaccgcgttgcaacgcgaggcggatggcctggctggcaacatcgatgaccacccggtgcgcgcccttctgcgagtagtgttcgagcatctgctgcaggcgcccgccgaagtcccaggtgttgcgctcaggggtccgttgcagcagcaggtagacggcgcgcagccagatcgtacggtagcgcggggcaatctcggagaacggcagcagcgcctccagggcctcctcgtcgcgccccagcaacgccaggccgtgggccttgtacagacgccgcggctggctgatgttgttccactccgctccctcgaccttctcctccatctcgccgatcagggccagcgcctgttccgcgcgccccaggttcagcaggatcgccacgcgcatctccaggaggctgtcgaatacctcctcgccggcggcgaggatcttcttctcctgttcggccaggaaggccagggcatcttcgccgcgcccgtcgtcgagcagcgcctcggccttctcgttgctcaggcagtggaagcaggcccaggtcgggtcgatccgcgccagggtctcgtcgcacacctcgatgcgctcctccacccagcccgggccgtcgacgttggcgtagcacgacgccaggtcctgggtcacgcagactgactgcgggcaggcctgggtgtcgtcgcggttggccagttcgaacagggaaacggcgtcggccagggcggtctcaccctccagttggttgccgacccggttacgcatttcccagtggcggacgaagatttccagccacgggttgttcaacgtccggctcagcgccttgacctccggcaacagcgcctcggcgcgctccacctcgaggtcgcagacgtacgcggtgagttcgtcgatcagccgcgcactctgctcctggccggcctcacgcaggtcggcgcggagcttctccacccagttccagatatccatatgcttcagtctccatcaggcgtgttgcgaattttcttattgccccagcaggcgcttcaccgaatcggcgagtccggccagggcctggttcagcgaggtcgcgggctggccgcgtccctgtccggcgatgatcactttgaacgagcgcagcagcaacgccgcatgggccgcttcgtcgcgttcctcgccgacggccgcgagcagcgcctgcaccgccggattgtcgaggttgacgtagagccggctcggctggcgattgtcgagcttgcgggtgaactgccgggccaggcgcaacgccgcggtggaaatacgcttgtcggcctcgtcgtcctccagtcgccgcttgagttcggcgtcgcggtcgggcaccaccacaagcggcaattcctcggggctgaagcgggcgatcaccagttgctcctcggcgccgcccaggtgttcggccagccagccggtctcgcgctcgggcagtcggtcgaggcggaacaactggcggttgccctgctcggtgcccagctccaccaggcgcatccccttggcctgagcccagcgacggaggaagggtaccaccgcatagcgattgccatgggccaccggtacgcccatggcacggaacagcatttcctcgaagccgctgtcgttgtccagcagcacatgcaccgctccgcgcgaaaggagttcggaagccgggaggtcgccctgggaggtgggtacgcgcaggctgtccatcatcagcgcgaacagacgctcgtcgcacaacgccgctcccagcagggcctcgttgtgccgcagcaggacccgccgccaggcctccggctgctgccgcgccacctcgccgagcccggcgatcagcgcctcggccagcgcatgctggatcgccgcgtaatggtcgtcacgctgcaggtcctcgcggctggcggtgggcgtcaggcggttcgactcgatcaccccgccgacgaacccggcccaggacggcagcaggtcgcgggcgtcatcgtcgagcagcatgccgcgaaggaataccgagagattgcggttgtcgctggtgccataggtgccgccgtcctggatccacagcaggccctgcacgtcgacccgctcgtccgggcgcaccggcaggcagcagatcggttcgaagtcatgttcgaaacgcgcggcgaactccaggtcgcggcgctgccgttgcagcgggtgcagcgcggcgtcggcggccagccgccacggcggcggctccgggttgatcggctgggcgtcgccgccgacgtggatcggctcgcgcaacagcacgcagtagcgttcgaggatctcgcgcaggcgcgcggcctgggtcagcgcactgtattcgtcctgcagctcgagggtgatctcggtgcctaccgggcgcgccggcatcggcgtcacgctgtattgctcggcgttgctggagacgtagcagaagcccagctccggctgctggtaggacgtggtccgcacgctgacccggcgggccaggacgaaagcggagaggaagcccaggccgaacatgccgatcagcccgctgtcctcgtggccggactggcgcagtccgcgggtgtagccgacgccgacggtggccaggtaggcgtggatttcgtgctcggtgagcccggcgccggtgtcgacgatgcgcacggtgttgctggcactgtcgccgatcacctcgattcgcgacggcccttgccagtcgggctgctccaggcggcgacggaggatcgagtcgtgggcgttctgcaccagctcgcgcaacgccacggtgggcgtggaatagaggtgcttgctgagcaccgacatcacgccgttgaggtcgactccggcgcgacggatctggggagtgttcgattgcggaaagctgctttgcatgtccctatccaagcgttcgatgaatggcgtccgctcgcacgcgagcggtccggtgcgggattctgccacgttccgtcacgttccttgtgcaacggcgtgcccgcgatgagcttcaggccgcatggaagctgcccggagtgcaatagagccgcgtcgcggcgaaatgttcaaccctccaggccgatcaattgtcgccggctgcgctcgaaccagtcgagcaggtaatcggcgagtacctgggtgcgccgcggcaggccgccctggaacggatggacgaggaacatcggcgtgctgcgcgtctggtagtcgcgcagcaaccaggccaggcggccgtcgcccagttcgtcgtggaccatgtatgacggcagccgggcgatgccggtgccggccagcgcggccttcttcaacaggctgtagtggttgctggcgagaaagccggcaacccgtacccgctccagccgatggtggcggtgatagagccactcctcgtggccgctgtagtgcgagttcagcaggcactcgcgctcggccagctcggccgggcgttgcggctcgccgtgtcgcgccaggtaggcgggactggcgcaggtgatttcctgcaggacgaacagcggccgcgccaccagccgggcgtcctgctcgaccccagagcgaatcgccaggtcgaagccctcgccaaccaggtcgcgcaggccgttgtacaggtccagctcgacgcgcagcagcggatggcgttcctggaagtcctccagcagtgcatcgaacagggtctcgcccagcgagaccgggagggtcacccgcacccgtccttccgctcgctcctgcaagcgcgccaccgcctgccgcgcgcgctcggcctgcaccagcaaggcctgcgcctcgggcagcagcgcggcgccggcggcggtcagcgaaagacggcgggtggtgcggtgcaagagggtcacgccgagcttctgctcgaggacgccaatgcgcttcgacagttggcccttgctgcaaccgagacgctcggcggcgcgggtgaaactgcccaggtcgtggagtacggcgaaggcggcgagatcgtccaggtccttcacgattgtttccctatgaaaacggtaggttgtcgattgacaggattatccatggcaaaagcgactctacactggaaaccactcaccttcactcaacgagaggcctgtatgaaaatcatcctgatcggcgccagcggcacccttggcaagggtatcgacaaagaactcggcgagcgccacgagatcgtccgggtaggccacagcagcggcgatttccaggtcgacgtcagcgactcagactccattcgcgccctgttcgagaaaaccggtcgcttcgacgcgctggtcgccgcggtcggcaaggtgcacttcggcgccctggaggaaatgggcgaggcgcaataccagctcggcctgcgcgacaagctgatgggccaggtcaacctggtactgctcggccgcgagtacgccaacgacgggggctccttcaccctcaccagcggcgtgctcgccgagcagccgatccgcttcggcagttcggcgagcatggtcaactgcgccgtcgagggcttcgtccgcggcgcagccctggagttgccgcgcggcctgcgcatcaacgccgtcagcccgaccgtggtcagcgaggcgctgcccggctacgcgccctacttccgtggcttcaagccggttccggcggcggacgccgcgctgggttacgcacgcagcgtggaaggcgcgcagaccggccaggtgtaccgcatctggtaagcgatatttctcaggagaggcggtcggcgtagcaggtcggcgaactacccggctgctggcggtccagctcctcctcgaggaactcggccagcaccatggcattgttgtgctgctggtcgtgggcgccgtagagcagcgtcagggtgccctcgcgagcgctgtcgagcaggccccaccaatgttccgggtgcgcctgcaactcggcgcggtagtgttcgcggaagctgtcgaagagtgccggatcgtggcagaactgcttgcgcacctcgttggagggcgcgacctccttcagccagtcgtccatggccagggcttccttgcggatgccgcgcggccacagccggtccaccagtacgcgccggccatcggcgggcgacgccggttcgtatacacgcttgcattggatcatcgatcgactccctggttgcgatgaagtccgatccggacttgagctaggcccggacgctcggtaacgtgggcgcattttcgatggagtcttccctatgcgccctgcccgtctgctggtctacagcctgctccccttgttcgccgcctgccaggtgtggaggcccgaatcgccgagcaccagtgtagacacccgcttccagggcgaactggtgaagatcaacggcgcgctgcaattccacccctgtaccgagaagcgcctgttcagcatcgaggacgtggccaataccggcctgcgccgcgaagccgacagcctgttcgacgacggcgcccagggcctgttcgtcgacctgcgcggcaccatgggaccggccaaggtccgcggtaccgacggcaagctggaggtcagccgactgtaccgcgtgcagaacgagggccccggctgcgacgacccgaacttcaagctgctgaccttcgccgccaacggcaacgaacccttctggagcgccagggtgaacaaccagggcctgcgcctggaccgcccggaacacgagaccctggccttgccttacgtcgccgaggaactgccgaacggcagcaccagctattccagcgaggcgaacggcaagaaggtcgaactgtggatcgccccgtcgtcctgcaccgacagcatgagcggtgccttcagcagctactccgccgaactgcgcatcgatggcgagacgctgcgcggctgcgcctatccgggcgcactgggcaagtgaagcgaggggccgcgcgacggccctttccctacaagagcaatccggcctgctccaggcgccgccgcagcgccgtcaggccgccctcgtactcccagtaggcgacgcgcccgtgggaggcgctgaccagcaggtatttctcgctgatcgactggatccgttcgatgcgcagcagtttctcgacgaagcgttcctcgccgatctgctcgacgatttcccggttgtccgcgtcgtagccgtggaccatgaaggcggcgcgcaccttgaggcggatgaaactcatcgcacggctctgcgctggagggaaagattgcgatggcacactgtcgagcgccccgagccgttcggtcgccgcgccggatcggcgtaggtttccagctcgacgaagccggccttgcgcatcattcccgccgacgccaggttctcttcgtgacgatcgatatagacatcctcgatgccttcgtcggccagttgggccagcaccgcctccagcaacgcgctgccgagcccctggccggccgccgccggatgcactaccgcctcgcagatgtaggcccgcggcgcatcggcacgctgcggctggtaatgggcgaaatcctcggtgcgacggaagctggcgaaccccagcagccgatcgtcgcgctcggccaggacggcacgtacctcgccgtcggcgatggctcgcagatgcgcacgcaccccctcctccggcaaatggttccagggattcggcccgtggcgcagcaacaggtcggtcatggcctcgatatcgccggtttcggcagctcgcaaacggtgcatatccactccttcaaagtccagccaccagcagcccgtcgggcaacgccacgccccgctcgatgcaggcagccagcgcctcgaccaggggttccagcgcatagccctgcctggccagccagaccggatcgtaataggtggtcgcatagcgttcgccgccgtcgcagagaatcgccaccagcgaacccttctcgccagccgcgaccatttgccgtgcggccaccagggcgccgatcaggttggttccgctggagccgccgacccgccgccccaggcgccgggccaggtaatgcatggccgccagcgaccaggcgtccggtaccttgaccatcgcgtcgatcacttccggcaggaaggacgcctcgacccgcggccggccgatgccctcgatccgcgaaccgcaatccagggtcaggccacggtcgccgctgacataggcgtcgaagaacaccgaacgctcggcgtcggcgcagagtacccgggtgcagtgctggcgatagcgcacgtagcggccgagggtcgccagggtgccgccggtaccggggctggagatcagccaggtcggggtcgggtacggctcgtggcgcatctgctggaagatcgattcggcgatgttgttgttcgcccgccagtcggtggcgcgctcggcataggtgaactggtccatgaaatggccaccgctctcccgcgccaggcgttcggactcggcgtagatctgggtggggtcctccaccaggtggctctggccgccgtagaaggcgatctgggcgatcttttccttcgaggtgctggccggcatcacggcgatgaagggcaggcccagcaggcgtgcgaaataggcttcggaaatcgccgtggaaccgctcgatgcctcgatcaccggcgcggccggcctgagccagccgttgcacagcgcatagaggaacagcgagcgcgccaggcgatgcttgaggctgccggtggggtggctggactcgtccttgaagtacagttcgacgccaggcaggccgggagtctccagggggatcaaatgggtatcggcgctgcgctggaaatccgcttcgatgatgcggatcgcctcgcgggcccattggcggtggtcgacggtcatggaaactccttcagttcaggacgccggccggaggcggcggcggagcgctgcgccactggctgatggcgacgccgatgaagaccaggccggcagcgagcatctgcgggccgttgagggtttcgccgaggaacagcgcggcgaataccagggtgaagaccgggatcaggttgatgaagcccgaggcctggctggccggcagtcgaccgacgccgaagttgtacaggccgtaggcgcccaccgtgaccaccacgccgagatacaccaccgcctggatccccagcgcgctgggctggctcggcaggtcggcgctggccagcgccagcggcaggaagaacagcgtgccgacgaaggcctgcatggcggtcagggcgaatgccgagtagcgcgccgaaaggtgcttcagcaacagggtatagccggtggcgcagagcatcgcgagaagttcgaagaagttgcccagcagcggctgcggcgcgtgcaggtcgggctcgccggcgaggctcagccagatcgaaccgagcaccgccaggccaaagccgatccaggtcatccggccgatccgttcgtgcagcagcaaccaggcccccaccgccaccagcaacggcagcagcgcggtgatcatcccggcctgggccgcgctggtgtattgcagggcgaaggattcgcagaggaagtacaggcagggttcgcagacggccaggccgagcaggtacttccagtcgcccgggcggtagtcgatgcgtccgcgccagcgccaggcaacgaggaacaccaggctgccgagggccatgcggccgaagatcacccagagcggcggcagttcgcggaaagcgaccttcagcaccacgtacgaactgccccacagcgccatcgccaggatcaggcaggccagggcgaaccagcgcgtccgagtcaagggaatctccaccacgggcgccgcgcggcgccggaaaaaggactcccagtataggcagccggctagctgcgccgacaggcacagaaagcgggcaaaactgttgcgccgggcctcactgctcccagggcttgccgcgagtcttcttctccagcggcaactgctgcagcaccgcggccttggccagcatgtaggcgctgaccggggcgctgatgaagaggaacaggctgatcagcaattcgtgcaggctgatgcccgcctggcggttggagaaatagatcagcgaggcgacgatcaccccgccgaccccgagggtggtggccttggtcggcccgtgcaggcgcatgaagaagtccggcaggcggtacaggccgatcgcgccgatcaggacgaaggcgctgcccagcaggaggaacgccgagacgatgatttccagccacaggctcaggggttcgccagtcattcgatgatgtctccgcgcagcatgtatttggccaccgccaccgtaccgacgaagccgagcaccgcgatcagcagcgccgcctcgaagaacaggtcgctgtcgcgccagatgccgtacagcaccagcagcgcgatggcgttcacgtagagggtgtccagcgccagcgcccggtccggcaggcacggccccttgaccaggcgcgccagggtcagcaacagggccaggccgagcagcgccaggcacagcgggatcacgtaagcgagcatgggaagatctccttcagcggcgcttcgtagcgttgcttgatctcggcgatcagcgccgccttgtccggcacgtcgaggccgtgcaccagcaaggtcttgcggtcgtcgctgaggtccgacgacaccgaccccggggtcagcgagacgatgctcaccagcacgctgatggcgaggtcgttctccagctcgatcggcacctcgacgaaggccggacgcaagcgctcgatcggtccgagggtcaggcgggcgacctggatgttggcgacgaggatgtcccacatcaccagcgccagcagcttcagcagcagcaacggatgccactcctggctgcgcccgaccagcaggcggttggtcagcagcggaatgcacacgccgaggaaggcgccgagcagccagtggccaatggcgaaggaatccaccagcagcaaccagaccagcaacagcaggacactaagcacgggatgaggcagtacgcgaagaagcggacgcggcaacgaacggctgatcatgcggcacctccgcggatgatgatctggcgatacaggtcgaggtcgtgcaactgcgccgcggtggcctggacgtaggccagcagcggcttcgcggcgaacaccagcaacgggccggcggagagcaacaggatgcaggcgaacaagcggccgtggtccagttcggcgctaccgagcacggtatgcccggtgcgccagaacagcgtgctgccagcccggctcaacgccaccagcgccaccaggccgctgcccagtaccacgctccatagggccagcgcctggctgccgggagcgaccgactgcaaaagcatgaccttgccgaagaaccccgacaatggcggcagaccggcaacggcgatggcgccgatgaagaaagccccgccgagcaaccgaggattctgcaacgccgggccctggaccaggtcgccggccttgtcgccgcgctggcgggcgaccaggtcggcgagcaggaacaggccaccggcgatccaggtactgtgcagcaggtagtacagcgacgccgccagcgcccgctcgctgcccaacgccacgccagccaggagggttccggcggagaccaccaccaggtaggccagcaggctttgcagggtccgcgccgccaaggcaccgatcgcgcccaggccgagggtcgccagggccagcggccagagccaggcctgcgccaggttggccagctcgccggcggcatcgccgaagaccagcgtgtagacccgcaggatcgagtagatgccgaccttggtcatgatcgcgaacagcgccgccaccggcgcgctggccgcggcataggcgcgcggcagccagaagtacagcggcaacagcgccgccttcagggcgaacaccaccagcagcaggagcccggctgccgccagcagcggcgcgcgctcggcatctgccatggcgatcttctgcgccatgtcggccatgttcagggtgccggtgaggccatacagggtacccacggcgatcaggaagaacgccgagccgaccaggtttaggatcacgtagtgcaagcccgagcgcacccgctccgcgccgccgccatgcaggagcaacgcgtaggaggcgatcaggagtatctcgaagaacacgaacaggttgaacaggtcgccggtcaggaaggcgccgttgataccgagcagctggaactggaacaacgcgtggaaatgcttgcccaggcggtcgtcgccacgcagcgcgtagatcagcgcggcgctgccgagcaccgcggtggccagcagcatcagggcggcgagacgatcgagcatgagcacgatgccgaacggcgcggcccagttgcccagggcatagacgctcaggtcgccgctggcggccgtacgtatcagcagcaggctcagggggatcagtgccagcgccgcgagcaacgacaggccgcgctgccagcgctcggccagcggcaacagcagcaggctgccggcaaacagggggagcaggatcggcaggatcagccaatggctcatgggcgcggctcctcctcgtccggacggccatctacgtggtcgctgccgaggtcaccgaggccacgcagggccaggaccacgacaaaggcggtcatggcgaagccgatgacgatggcggtcagcaccagcgcctgcggcaacggatcaccatactccccgggagtgccgatcaccgcgacgctgccgccgagccggcccatggcgaacaggaacaggttgaccgcgtaggagatcagcgtgagaccgagcaccaccgggaaagtcctcgcccgcagcagcaggtagacgccgctggcggtgagcaggccgagggtgatggcgaacagggcttccatcagagcgcctcctcttgtgcgacgggttcaggcatcaggctgagcttgccgaggtaggacaggatcagcagcgcggcaccgaccacggtgaggtacacgccgaggtcgaacagcatcgccgtggccagctcgatctcgccgatcagcggcaactcgaagtggccgaacgcggaagtcaggaacggatagccgaacagccagctgccgagcccggtgagcccggcgatcagcactccggcgccagccatggccgcatagttcagcggcaggcgctgctcgacccactgcgagccgctggcgatgtattgcagcaccagggcgatggcagtcaccaggccggcgatgaaacctccgcccggcaggttgtggccgcgcaggaagatgaacaccgagatcagcaacgccagcggcagcagcacccgcgacagggtttccaggatcagcgggtgcttggcgtgggcccagttgcgaccctgcgggtcgcaggtcggcttgtgcagggcgaaaccggcgagcatcgcgtagatgccgacgccggcgatcgccagcacgctgatctcgccgagggtatcgaaaccacggaagtccaccaggatgacgttgaccacgttgtagccgccgcccccggagacgctgttctcgacgaagaatccggcgatgctctcgtagggccgggtcagcaccgcgtaggccagcagcgccaccagcatgccgaccccgccggccagcgccacgtcgcgcaagccgcgcaggctggaggactccgccggagtgcgcgagggcaggaaatacagcgccagcatcagcaggaccatggtcaccacttccaccgacaactgggtcagcgccaggtccggggccgagaagcgagcgaaggccagggccaccagcaggccggcgacgctgaggatcaatagcgcgaccaggcgcatacgatggaacagcgccgtggccaggccgctgaaggccagcaccagcatgcccagggcggtgataccgtccagcggggtcaggccgcgcgagccggtcagcctcgccagcggtgccagctcgaccgccaccacgaccagcgccgcgcccagcagccaggccaggtagcgctgcagcgacccgttctccagccaggcggtcaggcgcgcggccagggccaccacacgttgcacctgctgctcgaagaccagcttggcgtccacctccggtaacccggcgtaccagttgaacagcggcttgcgcaggacatagaccagcacaccgccaaccagcgccaccacgctcatcagcaatggcaggttgaaaccgtgccagatcgccaggctgtattccggcagttgcccgccaaggctggcactggcggcggcggccagcagcggcgccacggtgtaggccggcagcatgccgaccaacaggcagaggaacaccaggatctccaccggtaccttcatgtagcgcggcggctcgtggggcgggaacttcggcaaccgggccggctcgccgttgaagaacacgtcgtggatgaaacgcagcgaataggccaccgagaacacgccggccagggtcgccaccgccggcaccagccagttgaagctgcccagcaggttctggctgagggtttcgccgaagaacatctccttgctgaggaagccgttcagcagcggcaccccggccatcgccagggaggcgacgatggccagcaccgcggtatgcggcaggtacttccacatcccgttgatcaggcgcatgtcgcggctgccggtctcgtggtcgatgatcccggcggccatgaacagcgaggccttgaaggtcgcgtggttgatgatgtggaacaccgcggcgacgttcgacagcggggagtcgaggccgaacagcagggtgatcaagcccaggtggctgatcgtcgagtaggccagcagccccttcaggtcatgctggaacagtgccatgccggcccccagcaacagcgtcaccaggccgctcaggctgaccaggtagaagaaccactcggtgccggccagcgccggatacagccgggccagcaggaatacgccggccttgaccatggtcgccgagtgcaggtacgcggaaaccggggtcggcgccgccatcgcgtggggcagccagaaatggaagggaaactgcgccgacttggtgaacacgccgagcaggatcagtatcagcaccagcggatacagggcgtgggcgcggatcagctcgccagccgcgaggacctcggtgagttcgaagctgccggcgatgtggccgagcagcagcaccccggccagcagcgccaggccgccccctccggtaacggtcagggccatcctcgcacccttgcgggcgtcggaacggctgccccagaagccgatgagcaggaacgaggacaggctggtcagctcccagaagagcatcatcagcaagagattttccgcgagcaccacgccgagcatggagcccatgaacagcagcaggaaagcgaagaaacgccccatcggctcctgttcggagaggtagtagcgggcgtagaggatcaccagcaggccgatgccgaggatcagcagggcgaagaggaaaccgaggccgtccaggcgcaggctgaggttgatgccgatttccggcagccaggaatagctggcggtcagggtctgcccggcgaacaccgtgccgcgctgcccgagcaacaggatcaggccgatcagcggcgccacgccggcggacgccgcgcacaaggtgcggccgccacgctcggcaagcaggggcaacaacgcccccatgaacggcagcgcgatgatcagcgccagaatcatgggctactcctcttcgatggcggagcccccggcatgcctggccggcggtgcttccccgcggttgtcggtgcgcggccggatcgccagcagctcgaagccccatcggccaccggcaggcgcggcgcgacggaactacgattatcgcaatctatcgaacgaacgtcatggattgaattattacaaaattcaggcgttccgactgccggaaagccgaaaaaaactctgcaacggcaacgacttgaagcttagcaagacaacgccggcagtggttcggcgctacaacgaaaacggccggcgaaatgccggccgcgggataacgtgggaagaatcagtgggcgacgcggctggtgccgttgacggtcaggatgcgcacgcgctcgccgacgcggaagatctggccctggtcgacctgctggacataggcgcgggtgctgccgtcgtcttcgcgcacggtgatctcgacgccctgggtgcgcgtcaggccttcttcggtagccgcgcccagcaggccgccagcgaccgcgccgatgatggccgcgacgtagctgcccttgccgccgcccaccgcgctgccggcgacaccgccgacgccggcaccggcgatggaaccgatcggggtcttggtgccttcgatcttgaccgggcgcaaggcctggatggtgcccatgcgtacagtctgcacggtacgggcttcctcacggctgtaggtatcgccggtgaggctggattggcagccgccaagagccagggccatggcggtgaaggaagcaacgatcaaggcagacttgcgcataacggcatctccgaaagggataactgacgaatattagactctcccgcagccgctcctgtcacctggccggcgcgagataatcgaatcgattcagcaatggtacaggttcgttcagtttcgaccgaaccctcccgctttcatcggcgggaccgatcggctagggtgagcgcccgcagaaggaacagccatggactatttcatcatcgtcgtcaccaccgccgccggcctgtatttccactggtggatctactggcgcatccgccgctggatggaccgcgacctggcgctgtcattcgccggcgacgacccgcaaaagcgtgactatctgttacagcgactggccgaggccaaggccagcaaggtgaagcggcgcgacctgccggcctggctggagcgcgccgccgccgactacccttcccgcgaagcctgagccaggcgccagagccgggcgatctgctcggcgcgcgcctccagttccgccgccgctccggcacaggcctgctccaggctgatcggtcccggcgccaggctgaacgccgcatcgatgccggcgtcgtgcaggcgctggtagccgtcgcccaggctgccggccagggctaccacgggaacgccggcctggcgcgcgatccgcgccacgcccaccggggtcttgccgtgcaggctctgcgcatccagacggccctcgccggtcagcaccaggtcggcaccgaccagcgcatcggccagcccggccagctccgccaccagttcgatgcctgggcggaaacgcgcgcggaggaatgccctcgcggcgaaacccaggccgccggcggcgccgacgcccggcacccggctgaagtcctcgccaagggtcgccgcgaccaccttggcgaagtgcgccagggcggcatccagttgcgccacctgttcggcgctggcgcccttctgcggaccgaacaccgccgacgcgccgcgcggcccgcatagcgggttgtcgacgtctgcggcgacttccaccgcgacatccaccaggcgcggatccagcccgcccaggtcgagactgtgcaggccagccagcgcggcgccgccgggcgccagttcctcgccgtcggcagccaggaaacgcacgccgagcgcgcccagcaggccggcgccggcatcattggtagcgctgccgccgaggccgaggataatcttccgcgccccggcgtccagcgccgcacggatcagctcgccagtgccacggctgctgctgcgcgtggcgtcgcggcggtcgcgcgggaccaggtgcaagccgctggcggaagccatttcgatcactgcggtggcgtcgtccagccagccccagtgcgccagggtcggctcaccgagcgggccttcgacacggcattcgcgacgttcgccggcggtggcggcgagtaccgcatcgaccgtgccttcgccgccgtccgccagtggccgcagcaacacctcggcctgcgggaagactcgccgccagccgcgggcgatagcctcggcgacgtcgggcgcggacaggctttccttgaacgaatcaggagcaatcacgattttcatcagtcacctcgcagggccgggagtccccggccccgcttcaatcagagcagcacaaggctgagcagccataccgcgagcataccggcgataccctggaccagggtcgccagggtctgggcgcgataggcagtggatacggtcatgcggctgaactgtgtgaccacccagaagaagctgtcattggcgtgggacaccgtcatcgctccggcaccgatcgccatgaccgtcagcacccggcccatctcgctgtccaggccgagctgcggcagcagcggagcgaccagcgccgaggtggtgaccagcgccacggtggtcgagccctgtgcggtcttcagcgcggccgccaccacgaacggcatgaacaggccgatgcccaacgctgacagggtgctgcccaggtagtcgccgagcggagtgatcttcagcatcgcaccgaaggcgccgccggcgccggtgatcagcaggatcggcgcggccgactggatgccttccaccacgcgctcatggaattcctcgcgcttgctctggcccttgagcagggtgcaggccagcgccaggccgaccagcagggcgatcaccggttgaccgaggaagttcaggcaggcgaacagtacgccctcgcccagcggcttgctcgggaataccgcgaccgagccaaggcagatcaacaggatcggtacgaagatcggcgcgaacgcctgggtggcgctgggcagcttgccgtagcgggcacgcagctcgctgaagtcctcttcggtctggacgacctggccgtcgtcgaccaggggaatgtccttgccgacgaagcgattggcccaccacatgccggccatcgcggtgacgaaggcgaccaccaggccgaccacgatcaccaggccaaggctggcgtccaggccgaggttgccggccgcggcgatcggtcccggggtcggcggcacgaaggtgtgggtggcgtagagaccggtggccagggccacgctcatggcgatggtggatatcttcatccgcgccgccagggcgttcttcagcgagttgaggatgacgaagccggaatcgcagaacaccgggatcgacaccaggtagccgatgatcgacatggtcagggtcgggaagcgttcgccgagcaggcggatcacgctttccgccatggtgatcgccgcaccgctgcgctcgaggatcaccccgatgatggtgccgagcacgatgacgatgccgatgtagccgaggatgctgccgaagccgccggtaacggtcttgacgatttccgccgtgggtacctggtaggcgaagccggcgatcagcgcggccgccagcagggcgaggaacgggtgcagcttgagtcgcgtggtggacaggacgataaaggcgatcaacgccagcaggatcaggaccagggtcatgagccgcctccttgttgttatgggtgtgggatgggcgcccaggggcgggtcattttcgctccgtcgggaccggacacgccttgtgcaacggccagaggaagacggcgctggaaggggaacattttgtgcgactgcacagtgaatcgattgatcgcccgttacccgcggcgcggaacgagcaattgcagccccagcaacaattgctggcggtgctccaggcgagcgagatcgagcccgctgatcgaagcgatgcgctccagtcggtagcgcaggctgttgcgatggattcccagcgcctgggcacaggcctgggcgtgcccgtcatgggcgcaccaggactccagggtagcggccagcgaaccttgcggatcgtggtcgagcaaccgctgcaagggcgccagcagctgccgcacctgccaactgtcgcgctggctgaacagcaggctggcgaggcggtgtccgtccaggatcacgacccgccgaccgggcaaccggctgcgcgcatagtccagcaggtcgcgcgcggcgcaggccgaggcgcgcagctcggccaggtcatgcgccgggtcgccggcacacaggcgcgccacgccccagccgcgcgcgtcggcgcgctccagccagtgctcgagcgtatctgcgtgggctaccggccggcaccagaacaccaggcgctcgcccagcgccgcgctccagtgctccgcccggccgccgagtgccgccagcaggcgagcctggcaaggcagcggatcggcatgctcgggcaactccaggaagaccgcctggcgcggccagtgcatggccagccccaggtgttcggcatcggccgccagcgccccgaggccgtggccgggatcgagcaactggcgcagccaggcttcgtgacgctggcgttgccagtgtcgctcgtcctgcatctggcgctgttccatgagcatttccgctgccatccgcaccagctcggcatagggccggaccacctccggcgcgccggtgatgccgagcacgccgaccagccgctcggcgtgcagcaacggcaggttcacccctggccgcaccccgcgcaggcaggcggcggcctgctcgtcgatttccaccacccgccggttggccagcaccagttgcgccccttcgtggcgggtatgcaggcgcgatggatcgccgctgccgatgatcatgccctgggcatccatcacattgatgttgtgcggcaggatcgccatcgcccgatcgacgatgtgctgcgccagcgtcgaatccagttcgaacatggaggattcagggcgccaggcgttcgcgccgccagccgccgtcctggcgtcgatagtcgagacggtcgtgcaggcggctcggccgcccctgccagaactcgatgcgctgcggcaggagacggtagccgccccagtgctcgggacagctcggcggctggtcggcgaaacgccgctcggtgtccgcgagcagccgttccagctcggcgcgatcggcgatgacccggctctgcggcgaggcccaggcgcccaggcgactgcccagcggacgcacctggtagtaggcgtcggattcctcgggagtgaccttctcgacgctgccttcgatgcgcacctggcgctccaacgccggccagaagaaggtcatggccgcccgcggattggccgccagttgccggcccttggcgctttcgtagttggtgaagaaggtgaagccgcgctcgtcgaggcccttgagcaggaggatacggcaatgcggatagccgtcggcgtcgacggtggccagggtcatggcgttgggttcgaccggcaggcgctcggtcttcaccgcgtcgtcgaaccactggcggaacaggctgaagggatcgctaggggcgttggcctcgctgaggccatcgcgggtgtactcgcggcgcatatcggccagggactgggtcatggcgcatctccagggggaaatgcgccatagcttaaccgcagactccgcctcgcgcttgatccgggacaatggcgccaagcgccctgccccggttcggctcagttgccctgggccagggacagcaggctggcgcgctgggtatagagcacttcgacgcgacggttctgggcgcggccggcggcgctggcgttgtccgcgcgcggcatgtcggaaccgacccccttcaggcgcaattggtcgcctttcaggccgctgaggcggaagatcgccgccaccgactgggcacgctcgaagctcagcttgtcgttgaccgccttgctgccggtgctgtcggtatggccgagtaccaggataccgctctgcggatcggcctgggccatcttggcgaccttgcccagcgggttgagggtgatcggcatcagcatggtgtggcgcttgggattgaacgagtagtcggcgggggcgatgacgatcaatgcgttgtcgcggcgttcgagggtgaactcgctaccggcgatcgcttcgcgcagggctttctcatgggcatccagccactccttggtgaccttctgctggaccagtgccggcttgcccgacgccttgctcgccgagctggcgccgaacggccaccaccaggggttggcggccttcggctcggctgcggcggcgacttctttcttcgccgcggcgatctcggccttctgctccgctgccttggcggctacgtcccgaccgccttcgtccttgccgaacggccaccaccagtggctggagccgacatgctcggcttcggccttctgttccgtggcctgcttggcgacggtctgtccgtcgtccttgccgaacggccaccatgaatggctggaagcctgctcggccggagccttggctggctgcgaggaagcgtcctgggtctggaaatagctgcagccggaggcggtcatgcagagaagaagcgtcgaggtcttaagcagtttcatacgtcggggtccgttggaagtgaaagaaggcgagcccgatggaacattcggctcaaccgccggtcacatcgcagcgatgccggagtcgatccactgccccggcaacgccctatctcatacgacgctttagattgtgtcgctaagccattatttggcaatgaaatttagcgtcgagccgacaagcggttaaaagttaaccaacggattacagacactcccccgcgacacgcgccagctgctgcgcccgcggatccatcagcacatacggccccaaggcgttgctgacaaaggaaaaagccaggtcgcgctcgggatcggcgaagccgatcgagccacccgccccagggtggccgaaggccttggggccgagtccgtaggtcgcattggccacgcccggttggtcgagcatggtgccgaggccgaagcgggtccgggtcagcaaggtccgatcctcgcctaccgcgtgttcgtgggccaactggcccagcagttcatcttccagcaaacgtccctgcaacaggccgctatagaagccggcgagcgcgcgcgcgttgccatggccattggcggccggctgctgcatgcgtcgccattccggcttgttggtgctggtgaggatcgacggcggattggtgaaggcacgggtggtcagcgccaatggctcgctcatcatggtcttcagcatacgctgggcggcagcgtcgccgaggctgcccttgctccgtgccatgtgggcgacgcggccgaactggctgtcgtccaggccgacatggaaatccaggcccagcggtgccgcggtgcgcgccacgatggcctcgcccggctcgcggccgtcgacccggcggatcacctcgccgagcagccagccataggtaatcggtgcatagccgtgcgcttcgccaggcgtccaccagggctcctcggcggccagtgccgtggtcatcgcctgccagtcgtagagtgcctcgggcggcatctgctcgcgcagcgccggcaggccggcgcgatggcagagcaactggcgcacgctgatcgctgccttgccggccgcggcgaactcgggccagtagtgtgccaccggcgcgtccagttcgagcttgccctcggccaccagttgcagcacggcaacggcggtgaaggtcttggtgcaggagaacagattgaggatggtgtcgcgctgccagggctgctcgccgtccttgtccgcgacgccgccccagaggtcgaccaccgtctcgccaccgacctccaggcacaacgccgcgccgcgctcctgcggattgtcgaaaagccgggcgaaggcctcggcaagcggggcgaaacggctgtcacagtggccttggggcgtcatgggcaagttccggtgggaaagtggtcggggcattcttccagccctcggcggccttgtgaaccctgacataagaggggttcgccgcaagcgggcggcggtgaatgcgcgctcatgaaccggctgaatcctcgcgcggcggcagaggctcgacggcaggcatggacctggccatcgccgacagtcgcgacagggcggcaaggttgcttcggcgcaccgtgtcgacgaagccggcgaacggcaagcccgtgatcccgaccaggcctatatggccgttctcgccgtccagcagacgcccgctggccggttggtcgaggtactggaaccagtgggcgccgacgatatacggactcttcagcgccgcctccaggaacgttcggtaggagtcgccgcgcgcccgctcattggccgcctcgctgacaccaccccagaacggaccgcgatcccgcgagccgaagtggaactcgctgatcagcaccggcttgtccagccgcgccagcagggagtcgtccaggccctgcccgggcaacggcgtatagaggttgaaactgaggaggtcgcaataccgggcgcaggaggtgatcgcctcgggagtgctgacggcgaagcggccgccgagcaggaggtggttcggtgcgtgccattgcagggcgtcgcgcagggtcttgaagtaagcgtcggcatacagccggaggaaggcgctgtagtcctcggcgatggccggatgcccctcgcccggcagcggagccgcgtagcccggcgcctccagggcctcccaggcggccagctcgatgccccaggcctcggccaatgcctcatggcccaggtacttggctttcaattgcttgacgaaggcgcgcttcgccggactgtccatggacagcgtcaaggctccgaaagcgaggccgtagcgcgcctgggccgagccgtcgcgcccggcccaggccagttcgttgtcggcgtagtagccgagcagccagggatcgtcgcggtggtcgcgagcagcgatggcgatgacgcgctcggcggccatggcgaagcgcgggtcgaagggatcgggcatggctccccaccagtcgaaaccgctgctgaccgtggcgtagtcgccggcgatcgacagcggcaggctgtagggcatccgcgtctgtgcggcgagcgccggatcgctccagttgccgaggctgttgaaaccccatgccgagaggcgctccagggtgcgctggcgccattcgccggcgagctggtcggcactcgcctggggagcgatgcgctggcgattggcaccgaggaaatcgaaccagcgaccatgcccgaagcgccgcccggcctgcgcggcgacgccgcggcggtcgtcgccctcaccgaagaatgcggccagcggctcaccctccgccggcagttcggcgaacatcggctcgcgtccttcgacgtaggtccggctgccgtcggcggtcaccgcattaacgcccagcgaccagaacggatgtccttccggagtaaccagccaccagcgcccgccacgtttttccgtgcggaagaaaccgctggcttcgaacaccggcccacccagcaggccgccgaaacggtcgcgcgccggtgtctgccgctcccagtcgcggagctgtgcggcctcggccgcataggcgctgcgcaactgctcgtcggaacgaatcttttccggccagtcggcgcggctgtactggccatagcgatcgatcaggccggtcaggatgctccgctccaccgccctccctgcgcgtatgccgaaacgtccgagcaggatgctctggggagcttgcggcgagcgcagggacaggctcagcgccccgaccctggcgcggtccagcgagccctccacgcgtggcgccagcagcatccgctggccttcgaccatctgcggcatcggcggccccgcacgcatgcccagagcctctggcgaaaccgcccgcaacggcaccagcagggtctgcggcgggcctgccggaagctctatggatgcctgcaaccccggcgcgccctgctcgccctcgatcgcgacctccagggtcatgtcccagctcatggcgttctggatgcgcaggctcacgtagtccgctgcggaccagtcccaacggccctgcgccggactcatgcgcaaggtgggccgttgcgccgggctgaaggtgacgcgacggagaatgtcgccctccggggtggcctccgccgtcgcgctgggcaggtcggcatcctcaagggtgatgccgaccacggccattggcttgacgaagttgaacagcacctgctgggtgtcgctcgccgccagcggcgtggccaccgcgagcaggccgagaagcaggggaagatgccaacgcgaacggatcatgaagcctgttttccttaactccatcccggcctgggcaaatgccgggaattcctgatgcggctcggacgtgaaggctggcgccctcccgcgcaggccagcgcgtcaggcgatttcccggcggaacggcggcaatgcattgaggatagccttgccgtagcgctgggtgaccacgcggcggtccagcagggtgatggtgccgcggtcctgctcggtgcgcagcagccgcccgcaggcctggaccaaccgcagcgaggcgtctggcacggcgatctccatgaacggattgccgccgcgcgcctcgatccactcggccagcgccgcctccaccgggtcgtcgggtaccgcgaagggaatcttggcgatcaccacgtgttcgcaataggcccccggcaggtccacgccttcggcgaaactggcgaggccgaagagcacgctgtcctcgccgtcgtcgactcgcgacttgtgcttgttcagggtttcctgcttggacaggttgccctggatgaacacccgcttgcgccagtcgcggtcgagaccgtcgaagacttcctgcatctgcttgcgcgaggagaacagcaccaggctgccgcgcgcgcccttcaccagttccggcagctcgcgaatgatcgccgcggtgtgctcggcggcgttgcgcggatccgccttgaggtcggggacccgcaataccccggcctcggcatggtggaaggggctcggcaccaccgcggtgaccgcgttgcgcggcaggcccgcgcgcatgcggtagcggtcgaaggtgcccaacgcggtcagggtcgccgaggtcaccagcacgccataggcgacgttccacaggttgcggcgcagggtctcggcggcgaggatcgggctggcgttggcttcgatgtcgtagaagctgccgctctcggcgagggtcagccagcgcgccatcggcgggctgtcctgcgggtcctcgcaggtgaaggcggtccacagttcccagttgccctgggcgcgcgccaaaagactaccgaacagcgggtaccactcctccgcctggtggctggcgatgccgccggcgccttcgccgtccatcgcctccttgaggatatcggtgaggcgggtgaacaggtcggtcagcttggagaagcctttcttcagctcgatgcccatctcgcggatatgctcggggaccaccccgccgacgaaacggtgacgcggccgctcgcgaccttccatgtcctcgccggcgcggaaatcgccgatctcttcgcaggcggtgaacatgaactgctgctgggtcttgatctcccgggccagctccggcacctgttcgatcaggcggccgaggtcgcccggcagcgggtgctgggcgagcagcttggtgaggttcttggcgatctgctccagccagtcggcggtagcgcgcaggcgggtgaaatgggcgaaatggccaatcgccttgtccggcaggtgatggccctcgtcgaacacgtagagggtctcgcgcggatcgggcaggatggcgccgccgcccagggccaggtcagccaggaccaggtcgtggttggtgacgatcacgtcgaccttggtcatcccttcgcgcgccttgtagaaggcgcactgctggaagttcgggcaatgtcggttggtgcactggctgtgatcggtggtgagctgcgcccaatgcgcgtcgtcgatcgcctccggccagctgtcgcggtcgccgtcccagcggttgccggccaggcgttcgatcatctggttgaacagcttgctgctggtctcgtcgacatcgatgttgaaaccgtcgtcggcgaacagttgcgccgtcgcgctctgcgcctggccttcctgcagcagcacgtcgagcttggacaggcacaggtagcgcccgcggcccttggccagggcgaagctgaaggccagcccgctgttgcgcagcaggtcgggaagatccttgtggacgatctgctcctgcagggcgacggtcgcggtggctatcaccaggcgcttgccactggccttggcgcaggcgatcgccgccaggctgtaggccacggtcttgccggtaccggttccggcctccaccgcgaccaccgccggctcgccctcgcggtgcccctcctcgtcctccttgatcgcgccgagggccttggccacttcggcgatcatcaggcgctggccatagcgaggcttcagctccttggcttcgagaaagcgggtgtaggcaccctggatctgggacttgagttcggcgctgagcatggaattcctgggcccggcgcgcagcggaagacgaatccgccggcgcgccatagctggataaattttcagtggttcgacagggcggctatgataacgcgcttcgtcacaaccgccagcggagatcgccgaatgaccccctacgccctcgtctacgccctgcatgtcctggccgccctggtctgggtcggaggcatgttcttcgcctggacgattcttcgtccggcggccgtcgccgcgctggaggccccagcccgcctgggcctgtggctggaggtgttccgccgtttcttccattgggtctgggctgcggtgatcctgctgccgatcagcggcgtcggcatgctgcacctgagcttcaacggtttcgccggcgcgccgcgctacgtacaggtaatgatggggctctacgtcgccatgctggcactgttcctgcgggtgcaggcgctgcaagtgccggaactgcgccgcgcggtgcaggcccaggactggccggcaggcgggcaggcgctggggaagatccgccgcaccgtcggcttcaacctgctcctcggcctgttgctgatagccctggtagcggcacgcccgagcctctgaaccggcgaggcgccggaagccgtgctgccggcctctcctcagaagcgcacgacgtccaggctgccgtcgctgccgttggtgccgttcgcgccgtcctctccgctgcgccccgcacgaccggcatccaccgagtagatccagcaaccggtggcgttatccgccgcacccggtttgccggccttgcctccagcgccgccgacgccgccttgcagacgggtttgcaagcgctccagaggaaaatcgcccggcacttccagacgaatccgaccgcccgccccgcccggaccgccgtcgcttccggattggccgtcgccacctttcagcgcgctgccccagaggcagccggaggccttgccggaagccccgtccaggccatcgtagcctggagcgccgacgccaccgcgggcgtccagcagcaggctttccacctccaccgcctgcaggcgcaaggtcaggtcgcggccgttaccggcgctttgccggaaggtgccggtcgcgccgggcgcggaaatgatgctgccatcggccaggcggccgctgacgacttcgatgctgattcgctcctcgcctggcgccacgccgatccgggcgttcttcgccatgtgcagttcctcgatgcgcaggacgctgacctccagcggaatcagcagggcggcatcctcgccgatctccactctgcgcaggcgcagctcctgggcccgcttgggcaggcgcatcaccgagttcgcctgcaccttcacggttccgccgataccctgctggcgtgccggcggcgcctcggccgaaaacacggcgccagcccaggccaggggaacgaccaggaacaatccgagcatggccttacgcatgatcgtcctccttgtcctgcggtaactcgctggccgggctcaacgccggcaacgcaagcatgtggaagaccccgaacagcaagacctggagacgatccagccagggatgcgcgcgcgctttcaggcgtcctccgaggacgagaatctcgatcaggtggatcaacaggatcaggccgccggctatcgacaacagccagttcagcggataggcgaacggatgcagcagattgaccagcaccgcgccccagaacaccagggtcacgagcttgcccagcccgagaaacgctttcatggaactccccccaagacatcgtgtgcgggggaacatactcgccagcccgccgcggcgccagccatgaacgaaaacgggggcttcgacgcccccgttctgctccgcgccgcctgcgtcattcgcgcttgatgaggatttccacccggcgattctcggcccgcccttcgcgagtcttgttgtcggcgaccggctggctttcgcccaatccctgcacgccgacgatgatgctcgaaggcaccccggcatcaatcagatagttcgcaacggcattcgcgcgccgttccgacagcttctggttgtaggcatcggaaccgacgctgtcggtatgcccggtgatactcaggcgcgtactggccgcctcgcctttcaggcgttcggcgatgccgttgagcttctcgctgtcggcggcgtccaccttcgacgaatcgaaggcgaagtgcaggtcgcgcacgacaatggtttcttccttgacgacgggaggcggcggcgcgacttcctcgaccggctgcggaggcggcggcgcgacctgttcgccggcaccgtgcacccagcaataggcggcaccgacgccaccgccgatcagggcgccccagccggcccagctgctgctttcgatcgcgcccaggccggcgccggtaacaccaccgaccgccgcacaggtcggccagtcgcttttctgcaaccctgcgcaaccggtcagcaagccgctgaccagaatcaggggtaaagcggtcctcgtgatgctcattggaactctcctcgtggatcggttgtaaccgacaaatagggagtaaagaccccagccgaaaaaagcgccagcactaggccatgcaggcgcttcaggctagtcttggcgaatcccaggagagtgttttcccatgagcgaaccgatttctccccgcaccccgcagcaggccctggccgcgttgctcgcccgctacgcgccgaagcgcttgctgctggtcggcgccagccggctgccggcggtggaggccttcatccacaaccatccccagtgccaactggcgcacagcccggcggcggcattgcccgccgaactggccggccagcgcttcgacctggcgctgttcgtcgattgcctggaacacctgccgcagcgcaccggtctgcagttgctcgcgggcgtgcgcaacctgaacgccagccgggtcgccgtactggtcgacctcgaggccagcgactggcaggaaaccgacttcttcgccctcgccatgcagaacagcgaacgcttccagcgcgaaggccagacgctgaccctgtacacctacgacctgtacgaatacaagcaggtccccgattggctgaacgccaagttctgggccaacccggaaaacttcggcaagtactggtggtaaccatgacccaaccctcttgcccctgcggcagcggcgacccgctcgacgattgctgcggccgctatcaccagggacatcccgcgcctaccgcggaagccctgatgcgctcgcgctacagcgcctacgccctcggactggtggactacctgcgcgacaccacgctgccggcgcaacaggccggcctcgatctcgacggcatccgcgcctggagccacggcagcacctggctcggtctggaggtggaaaaccacgaggtgctcggcggccagccggagcatgcgcgagtcaccttcgtcgcgcgctggcacgacgccgacggggaacatgcccatcgcgaatgttccggcttcgtccagcgcaacggtcgctggtacttcctcgatccgaccgtggccctgaaactcggccgcaacgatccctgcccctgcggcgccggcggcaagctgaagaaatgctgcggtccgtggatcacctgatgcattcgctcgccagctatatccgcgccatccatgccctgccctcgccggtctcgataagcgatgcgcaggtcgaagagcaacagcgctgcgaggacggcgtcgagatccacagctgcgaagcgctctaccgtttcgacaacggcgtgcgcctgcgccagcactgcgagcgcgacctcctgccgagcagcggggcctgcgaggaatgctggatcggctacgaagtgctggattccgccgggcaggaaatcagcccacgctacaagcacttcgtcaacgcctgccaggaacgcttctggttgcgcatgcacgcctgagatgctgcgccaggctgcgcggtttgggcgttgacgagcgctcgggtagaatgcgcagccttttcatccgggccccatccccatgctgctgaccgtgctctacatcatcgccatcaccgccgaagccatgaccggtgcgctgtcggccggccggcgcagcatggacctgttcggcgtggtgctgatcgcctgcgtcaccgccctgggcggcggctcggtacgcgacatgctgctgggccattacccgctgacctgggtccgtcacccggaatacctggcgctgaccgcagtcgccgcgctggtgacagtgttcatcgcgccgctgatgcgccacctgcgctcgctgttcctggtactcgacgcggttggcctggtggccttcaccctgatcggctgccaggtcagcctggaaatgggccacagcctgctgatcgcggcgatcagcggggtgatcaccggggtgttcggcggcattctccgcgacatcctgtgcaacgacgtacccttgatattccgccgcgaactctatgccagcgtgtccttcgccagcgcctggtgctacctgatctgcgtggagctggaactgccttccgagcaggcgatgctgatcaccctgttcagcggcttcctgttccgcctgctggccatccgcttccactgggaaatgcccaagttcgtctaccaggacgatttcgaccactgaagcaagcgcctgccccctggccgacgcgttcctccaacccctcgcctgtccccgatgccacggcctcgcgacgcggttatccgccccacgccctggcttgtcgcaggccgctgcccgcctcagtcctgcaggcgcaggtggctggtgtccggagccggagccgctggctcggagcgtgcctggcccatgtcgctaccgaccggggcgacgctgaagcggctcaggtcgagtttcggcgcctcggcttcggccttggcgtcctgtaggtcggcgcctaccggagccaggccgaaatccggcgcatcgacctcggcgaacgccgccatgtagccgtcccgcggcgctacctgcaagcgtccggcgggcgcgctggtaccagtagcggcgcgggtctgcggggcctccacgggagtcgtctgcgcaggcggcggcgccatgaccacctcctcgacctccatctcggcgaccacggcgatcgctcccgctcgctccagcacgctgcggtatttttccgcggaggcggcatcgaggttgttcttgatcaccacccggcggccggagaacagcagttcgatacgctgcgcgtcggcctggaacagcttggccaggttggccttgaccacctcgggacgggcgccggcgaccaactggccggaaaaggcgatttcaaagcggctcattggcatctctccgagtgaagggccgctcggcatggcggccctggcgtttcgtcgagcgattgtacccatcgacagccacgcgtggagtgactgggtccggcaaatcggccggcgggtccgttcaggttagccgagccggtcacgccagccgacgggaagacttgcacgggcgtacgcgcttctccatgctcccccgactgcgctatgggaaacatatggacacaggcctgtacctgaaacatctttcctctatacaacaataagttgcagcacaatcactgcttgttaaactggggcgtctcggggggaatagcatgaattaccaggcgcaaatgataagaattatcagcctaataatggcgtggggagttctctcccatctctcgggctgcagctggatgaccggcagcttcgaagaccccgacgtcaagctgctgaaggtggaagtggtcaaggcacgcttgctggaacaggagttcgtgatgcgcttccgcatcgacaaccccaacgatttcagcctgccggtacgcggcctgcagtacgccgtgcaactgaacgacatccagctcgcagaaggcgagtccggccagtggttcacggttcccgcccacggccacgaggtattcgacgtaccggtgcgaaccaatctctggcgccacatgaaatacatcgtcaagctcctcgagcgtcccgaggagccgatccgctaccgcctgcagggcgaagtgaagaccggactgatgttcggccgcagcgtgcacctgagacgaaatggcgagataattcccggcgatttcatcccagaataggtccaccatgagtcaggaaccccacgtacacggcccgaactgcaaccacgaccacgatcatcatcacgatcatggccatggtcatgtccatggtccgcactgcaaccacagccacgagccggtgcgcaatccgctcaaggccgtaggccgcaacgatccctgcccctgcggcagcgagaagaaattcaagaagtgccacggcgcctgacccttcgcacgcgccggcatccgaaggcccgctgagcagcgggccttttcgttggcgcgccaccagccccgccggggcgtcatgcgcgacagcggtttgcatcgaacctaggttcctggcgtagagtcttccgttcgtagcccatcgacgagccggagacgcaccgatgatcgacctgtactactggaccaccccgaacggccacaagattactcttttcctggaagaaaccggcctgccctacgccatccatccgatcaacatcagccagggcgaccagttccaggcggatttcctgaaggtgtcgccgaacaacaagattcccgccatcgtcgatcgccaaccggccgacggcggcgctcccctgtcgctgttcgagtccggcgccatcctgctctatctcgcggaaaagaccggacgcttcctcgccaaggacctgcgcgcgcgccaggaaaccctgcagtggctgttctggcagatgggcgggctggggccgatggcagggcagaaccaccatttcaaccgcttcgccccggagaagattccctacgccatcgaccggtacgtcaaggaaaccgcgcgcctgtacggcgttctcgaccagcgcctggcggaccgcgccttcgtcgccggcgacgactacagcatcgccgacatggccatctatccgtggatcgtcccgcaccagtggcaggagcaggatctcgccgacttcccacacctgcagcgctggttcgagagcattcgccagcgtccggcgacgcaacgcgcctatgctttggtggagcgcatcaatccgccgcagtagcgggtcccgagccggcctgcggacgtcctcgcggacgatcgcaggcggagcttgcgcagccctgcgctcctcactaacgtagcgcctctcgacgcgaccactcccgcaggagcccccaccccatggcctcgccagccttcatgcgttttcttccccgttgcggcgccgccgcggccttcggcaccctcctgggcctggccggttgccagtcctggctcgacgatcgctacgccgacagcctgccgccgacctccggcgtgcaaccgatcaagggcctggcgcaaaacgtatcgatccggcgcaacgcgctgggcatgccactgatcgaaaccggcaccttccatgacgcgttgttcgccctgggctacgtacacgcctccgaccgcctgagccagatggtcagcctgcgcctgctggcccagggacggctggccgagatggtcggccccggcgcgctggagatcgaccgtttcatgcgtaccgtgaacctgcgccaggccgcggagatccagtacaggaacgcctcgccgcgcctgcaacgcttcttcgaggtctacgcgcgcggggtcaacgcctacctgtatcgctatcgcgacaagctgccgatggacctggcccagtccggctaccgtccggaatactggaagcccgaggactcggccctggtcttcgccctgctcaacttcggcctggcggtgaacctgcaggaagaaatcgcctcgctgacgctcgcgcagaaggtcggcagcgacaagctggcctggctgacgccgacctaccccgacgaaaacctgccgttcgacgaggcggaaaagctcaagggcctgcgcctggacgggcaggttcccggcctcgcgggcgtcgagggcgcggcgcggcaggtcgcagcgctgagcatgctcggggtcgccgcctcgaacaactgggctatcgcgccgcaacgcagccgcagcggcaagagcctgatggccaacgacacccacctgccgctgagcatgccgtcggtgtggaactacgtgcagatccgctcgcccaagtaccaggccgcgggcgtttccatcgccggtctgccgggcgtggtggcgggcttcaacggcaagctggcctggggcatgaccatggtcctgggcgacaaccaggatctctacctggaacagttgcgacgccagggcaaccggctctattacctggccgacggcaagtggcagccaacccgcgaacgccaggaaaccttcttcatcaagggccagcggccgatccgcgaggtcatccacgaaacccgccatggcccgctgctcaacagcgccctgggcgagcgcaagaacatcctccagccgctgccgctgaagagcggctacggactggcctaccggagcatccagcaggaagccgacaagaccctggacggcttcttcgacctgtcgcgggccaagaccatcgagcaggccttcgacgccacccgcgagattcgcgcgatgccgctgaacatcgtgttcgccgacgaaaagcacatcggctggcaggtcaccggacgctatccgaaccgcaaggagggtcgcggcctgctgccctcccctggctgggacggccgctacgactgggatggctatgccgacccgatcctccacccctccgaccaggacccgcagcagggctggctgggtaccgccaaccaccgcaccgtgcagcccggctacggcgcccagttgtccaattcctggtactacccggagcgcgccgagcgcatcgcccagctcgccggtgccagcaagagccacgacacccagagcatgatccgcatgcagtacgaccagacctcgctgttcgtcgccaagctgcaagccatgttcgacaatcccggcatggcggcgccgctgcgccaggccatcgacgccttgccggaggcgcaacgcagccgggcgcgggaggcctacgaccggctgatggcgttcgacggcaagctgacagccagctccagcgacgccgcgctgtacggcgccttcctccacgagagcgccaggcagatattcctcgacgagctaggaccggaggacggccctgcctggaaagccttcgtcgagaccgccaacctctcctactcggcgcaagccgaccacctgctcgggcgcgacgacagtccgttctgggacgatacccgcactccgcagaaggaggacaagccggcaatcctcgcgcgcagcctcgccgccgccgtggagttctgcgaacagcgactggggagcgagcgcaaggcctggcaatggggcaagctgcacacctacgaatggcggagcgacagctcgaaaatggccccctacctgggcgccggcgagcgcgccggactcggcgcgatcaagggctatctcgatcgcgggccctatccggccggcggcgaccacaccacgctggacgtatcggcctacggctggggccaggacttcgacacttggctgatcccggcgatgcggctgatcgtcgacttcggccagagcgaaccgatgatcggcgtgaacagcagcggccaatccggcaatccggccagcccgcactacgccgacggtatcgacgcctggctcaaggggcgctacgtcagcttcccgttccagccacagaacctcgatcgcgtttacggcaacaagcggctgacgctcactcccgctcgctgaacggacggcgcggaactttcctccgcgccgtggctctgaacagccgacttactccatgatcatcttcagggcgtccttccggacgcccttcttttatccccctcccggaaagcctccgttttctcgaaagcccgggcacgggatcgaaccgatctcactcctctccggcctcttccacgggcgccaccagcgcccggtccagccagtccgtcggcaggctcttgctggcgcgggcaccgagcagcttgagttgctcgctgcgactgatcaggttgccacgtccctcggtgagcttgttgcgcgccgcggcataggccttgtccagttgctgcaggcgcgaaccgacctcatcgaggtcctggacgaagagcacgaacttgtcatacagcgaaccggcacgttcggcgatttcccgcgcattctggttctgccgctcctggcgccagaggctgtcgattacccgcagggtggccagcagggtggtcgggctgacgatcacgatattctgcgcgaaggcgtcctggaacaggttcggctcggcctgcagggccgtcgaaaaagccgcctcgatcggcatgaacagcaggacgaagtcgaggctgtgcaacccttccaggcgtcgatagtccttgccggagaggcctttcacatggttgcgcaacgacgttacgtgctgcttcagcgcctgctggcgcagcagatcgtcgtcagcggcgatgtactgctggtaggccgtgagactgaccttggcatccaccaccacctgcttgtcgccgggcaggcggatcagcacgtccggctggaagcgttcgccctcggcgcccttcaggctgacctgggtctcgtattcccggcctttttccaggcccgcatgctcgagcacccgctccagcaccagttcgccccagttgccctgggtcttctggcccttgagcgcgcgggtcaggttggtcgcttcctcgcccaggcgcaggttgagctgctgcagacgctccagttccttgctcagggagaaacgctcgcgcgcttcctgctggtagctttcctccacccgcttctcgaacgcctggatgcgctccttcagtggatcgagcatctgccccaggcgctgctggctggtctcggcgaaacgctgttcgcgctcgtcgaagatctttcccgccagttcggcgaactgtgcccgcaactcgtcgcgggccgactgcaggtcggtcaggcgctgctggtggctttcctgctgctcgcgaagttccgcagccagcgcagcccgttcggaagccaggcgacgcacttcctcttcccggccctggcgctcgctggcccaacgtgcctccgcctgggacgcccgttgccgctcctcccccatcaactcggcttcccgacgcagcgcggcgacctcgccggagagcctggcatggcgctcgccgagttgctggtaagcctccctactggtctccaactgcgcattcagcccgtcctgggccagttgcgcggtcgccagtcgctcgccgagcaaggctatctcgcgctccgccaggctggcccttctctgtagctgccatgccaggccggccaggggaatcgcggcagccagcaggccaagcaacaggttcggtagatcgacgggcatggggcactccagcggaaaacgacgcaacacccgcctggcaggcgcgcgtgcagcggattctaggttcttgggaaaagaccgtcgagcgaatagcgccgcgccgaacgagcactccgcttccgagctgtgcgtaccccatgcgcaggacatttcagatacttccataacggaaaccatcgccctgcgcccttcgccgccgggacatttctgcttccacggcatttttgtcgcggctacagggcttgccttggagcgtgcgatgtgctgtcgagcaagcgcttgggaaatccacagatcctgtggataacccagtggaaaagcccctaaaaaactgccgaacccccgatggagtggggctatgggacagattgacgattttttcaccaactatttttatcgttatttttcaataagttacgtttcaaacatgaaaaatcaagcgtttagagcctaacgctctcaacccttgacaagctgctttccatttgtgcacaaattttcgccgaagcctcttgccgccccattgcagggcaatgccgttcgaaatcctcagccactctttccctcggggcatgcaggccagccctgcccaaccggcaggtggcggccttcagacggcgcccccggatcgctggcaaccgtgccccctccactcacgccggatgcggcaactttccgtccaccaggaacagctcccaggagaagattttcggcgaccccggcacatgcgccggcttgaaggccacgtaaccggccgtggtttcgcacagccagggcgtcaggttgcgaggacgcttttcggtgaaggccgcgggcgtgaacagggcgacattgcagccgcgctccgggcaacgcgccgaacggtattcgaatgcctgcaccccggcgctgcgcatggcagttcccagttcctggggagcgcggtagtcggcgatgtcggtcagcgcagcctcgtgatcggagaaaggcggcgcctgcagacggattccccgctccaccttccagcccgcctcgaacgaagcgtgctcggacagaatcctcccgctcggtggcggcaccaccatgccactccacaggacgcaacggtaatacgcgctttcggccatggccgtttccagcttcaacgcggcgtagaacaggcttggctcgtggcgacggccaaaccgcgacccccagcgcaagggcggataacggaacggggtcttcaacaggtaatgcaatggctcggcatccgccggcaccggcggcttgctcgactcgagcagttcctcgagcaacgcctgttcttccagggtgtcgaccaattgcagggtcgccacctgctcctggctctccaccaaccgcaccaggcgcccctggagcggtcggatatgccgctcacccttgcactgtcgccagatctcgctcaccttccgcccctcgcttcctgtggtgtcggatgccagcgtagcggcaccgcagtctccattcagccaggcgtgtcgcctctggctgccagccttttccgtgacaggcgtaggccccgtacaggcgcgccgggtatcagaccttgccgcggatcgcatcgaggtattccagcacatgaaccaggccctgcacctgtcccatcagtgccagcggctcgcccgccaggtgatggttgggagtgcgcaggaagtggcgcatgtcctcctgctgcccgccgaacagggcatacagtgcgcgatagactcgcaccagcagcagagccagctcgccggtcttgctgtccacccgcaggccctgggtcttccagcggctgatggcgctgcgatcgacgccgacgatgccggccagttcgagctgcgtcagccccaattgctcgcgcgcggccaggacggccttggccaggacggcatcggcgctgggacgttccttgatgagagcgctcatgacgacctcctcatgtgtgtttacaacaaactatcattattttgctgaaaacacaccttgattcggtcgagcctagagaaccacgcgcaagcattgaccggcgtgatagagagaaaaacccatctcgtaggcgcaactgcgcagcctggccgcggggacgggcttcatgtcactgaacggcaacggcaatgtcgctcgctcgccgctcagcaagtagtcggcgaacgccttgcccactaccgtaccggtggtcacgccgcgtccgttgtagccggtcaccgccagcaagccttccgcaggctcgaacaggcgcatcagatgatcgggggtgaaggcgatgcaacccgtccagctgtactcccagttgacctggcccaggtcgggaaagtaatggctctggattcgatcggcccattgccgcaggaaccaggcgggcttgttcgcgccattgccgaggcttcccagcaacaggcgaccctgggcatcgcgacgaatgctgctgagcaccgtcctggtgtcccaggaaccctggccgtgaggcaggatgcgctcggccgcggcgccgtgcagcggcgccgaagccacctggtagtagtagccgggaaagaagtgccgcctcaggttggtccactcgccctcggtataggcgttggaggcgatcaccacctgttccgccagtaccgcccccgcgctactgcgcaccgcccacagcgcgccctgccgctccagggcgagcaccggcgagcgctggtacagttgcccaccccgctgtacgacggcggtggccagtccgcgcgaataggccatgggattgagagtgccggcgcgtcggtcgagcaacgccgcgctgattcgccgggtgccgcaggcctcgtggcaagccgcgccggtcagcaactccagcggagcgccgcggcgcgtccactgcgcgtgacggcgttgcagatcggccacgccgctggcgttgtgcgacatgtgcagggtgccctcgcggcgcaactggcaatcgatgccgaggcgttcgatggtctccatcaccagcgccggcgcccgccccagcacggcgttgagcttttctccctgctcggcgccgagggtggcgaccacctcgtccgggggaatccaggtgccggcgttgatcaatccgacattacgtcccgacccgccgtggccgacctcgtacgcttccagcacgcacaccgaacggccggcctccagcaggtggagcgccgccgaaagcccggtgaaaccggcgccgatcacacatacgtcggcgcgctgctcgccgttcaggctcgccgctccggacaggcgaggcgtaaccacttcccacagacaccgttgctgcaaaccgcccatgcgcgactccgctgccagcctcattgccatgcggcgggagcccgccgcgccccgttcaatcgaaggtgatgccctgtgccagcggcagctcgcgggaatagttgacggtgttggtctgccgtcgcatgtaggccttccaggcgtccgagccggactcgcggccgccgccggtctctttctcgccgccgaacgccccgccgatttccgccccgctggtgccgatgttgacgttggcgatcccgcagtcactgcccgccgcgccctggaacagttccgcctcgcgcaggtcggtggtgaagatgcacgacgacagtccctggggaacctcgttgttcaggcgcagggcctcgtcgaaatcgcggtagccgaccacgtacaggatcggtgcgaaggtctccgtgcgcaccacttcggtctgtcccggcatctcgacgatggccggcgacacgtagtaggcatccggatagcgctcctgcaattgccgctcgccgccgaacacccgccccccctgctcgcgggctcgcgccagggcgtcctgcatggccaggtagctgcgttcgtcgatcagcggcccgaccaggttgccctccagcggatgaccgatacggaccctggaataggctgccttgaggcgctcgactatctcgtccttcaccgactcatgggcaatcaaccggcgcaaggtggtgcagcgctgcccggcggtgcccaccgcgccgaacaggatgccgcgcaccgccaggtcgaggtcggcgcttggcgccaggatcatcgcgttgttgccgcccagttcgaggatgcagcgagcgaaacgcgccgccacccgcggcgccacttcgcgccccatgcgagtgctgccggtggcgctgaccagggcgacgcgacggtcgtccaccagcgcttcgccggcctcgcggtcgccgatcagcaattggctcaggtgcgccggcgcatcgccgccgaaggcccgcgcggcacgctcgaacagtgcctggcaggccagtgcggtgaggggggtcttctccgaaggcttccagaccacggaattaccgcagaccagcgccagcgcggtattccacgaccacaccgcgactgggaagttgaacgcgctgatcacgcctaccacgcccagcgggtgccaggtctcgcgcatgtggtggccgggacgctcggatgcgatggtaagaccgtacaactggcgcgagaggcccaccgcgaagtcgcagatatcgatcatttcctggacttcgccgaggccttcctgggtgatcttgcccgcctcccaggacaccagttcgccgagttcggccttgtgccgacgcaattcctcgccgaacagccgcaccagttcaccacggcgcggcgccggcacctggcgccaggcgcggaacgcctgttcggcgcgctcgaccttggcggcaacggcggcgcgcccctccagtcgcaccgcagccaggcgactgccgtcgatgggggtatgcacggcaagctcgccatcgcgaaaggcattggggtcgaggccgagactgcgcagcaatccgtcgatcatgtgaggttctcctggctgttcgtttccgctcgttttagtcggtttgcccggtagcgacaaacgacctttattcgccacgtcattccgagttttcatactggctccgagctgtcgcgatccgccgtgtttcccgtaccatgcacgccttcgccggccagcccccgcctacccgacatggacaagaaaaagctgttgcgcctgatcacggaaaagctcgccgcggacctggaagtcgccgtccgcgccgcgcagaccgcccatgagacggcaacccacgaagagaacgtcgccgagaacaagtacgacaccctcggcctggaagcggcctacctggccgccgggcagtcgcgccgggtcgaggagatccgccaggcgctgggcctgtaccgcaacctggtgctgcgcgatttcgacgaggaacagggcatccagctcaccgcgctggtcaccctgctgaacgccgacggcagccggcgaacagtgttcctcggccccgaggcggccgggctgaagatcgattgcgaaggtcgcgaggtgttggtcatcacgcctcgctcgccactgggccagagcctgatcggcaggcacccgggcgacgagaccggggcgaaggactccccccttgcggtggaaatcctcgccgtcgactgaggctactgctgcggcgcaccgcaggcgccgcagaacttcgcgcccgccgcgagatcggcgctgcaggcgatacagcgcagcggcgccagggcgccgccgcagccctggcagaatcgtgccgtcgccgcattcgcggtgcggcaggcgcgacaggccattcccgccgcgactggcgccggcggatagccgccctgaccgcggtgatgaccgccgccgtgatgaccaccgccctgtccatgatgacgcccacccatcaacaaccgttcgaagaaccccatggcacaaccctctcgtctggatctgacggcttccagtgaaaaggctgtagccactacagggtcaatggcgcggaaacatcgggaaactcaagtccgcttcaccacagcggcaacgcgtagctgacgatcagccgggtctcgtcgatgtcgttgccgaaatcgctgcggaaggtgccgttgcgcaacttgatccccaggttcttcagcggccccgattgcaccaggtaggcgatatcggtgtcccgctcccattccttgccgcgcccaccgccgtccagaaggtcgatgtgttcgccacgcaggtagcggctcatgaatgtcaggccgggcaggccgatggcggcgaagtcgtagtcgtagcgcaactgccaggagcgctcgtccttgttggcgaaatcgccgatctgcacgaagttgaccagatacggatcggtcccggccaggtaggcgaagccgctgtcgccggacatgcgctggtagccgaggccgaaggcgtggccacccaggcgataggtgaacagcgcattcagcgcgcgattgtcgacgcggctgccgccctcgtcggtggaacgcgcccagcggatgtcggacttcagcgactggtcatcggtgagcggcaagaggtgctgcacgccgagataatgctggcggtagaaatcctccaggttggcgtagtggtagctgctgctcaggcgctcgctccagcggtaggtaccgccggcgaagtcgaagcggtcgctgccggggtgccggcccgccagtacgttgcgcttgttgccgcgggtgatgccgaggtcttcggcgttggtcgagtcgcgctgcttgacctggcgcaactggccaaactgcagcgccagcccgtcgatctcgttcacttccagcagtccaccctggaaggtttgcgggtgcaggcgcgtgtcgttgaactgcaccaccggcagcctgggcatcaggctgccgatcttcagcgtactgtgcgagacccgtagcttggcggtcaggcccaggctggaatagtcgtgggcggcgcgccggtcgctcgtcgaatacggcaacagaccactaccggatcgctctggcgaggagtccagcctgacgcccagcaggcccagcgcatcgatgcccaggccgaagagcccctcggtgtagccggactcgtagcgcaacaggaaaccctgcgcccactcctccgaataggactggctggcgccgggctggcgatagtcgcgattgaaatagaaattgcgcagttcgaggccggccttgccgtcggcgaaaaactccgcctgggcgaacgacggcagcaacgccagccccgcggccagcatcggaacgggaagaattttcattgttgttgtctcttcgtcgtcagtggatagacacggcgccgcggccactccctgccgcgaccgccgtggcggagcggatcagaccccggcgagcatgccctccaggcgttgacgcaccagttggcgcgcctgctcgacgatgtccctgagcaactcggcgcaggccggttcgtcgtcgatcaggccctggaccatgccggccgaccagatccccaggtcggtatcgccctgctggtacacctggcgaccgcgctggccgctgaccagcgcggcgatatcggcgtagccggcgccgccgcgtgcctcgatcgccagtacttcctggctgatcgcgttgcgcgccacccgcgcggtattgcgcagggaacgcatgatcaggtcggtggaacgctcgtcggccgcacggatcgccgccttcaccgcagggtgtatcggacattcgcgagtggccaggaagcgcgtgcccatgttgatcgcgtcggcgcccagcgccagcgccgcgaccaggccacgtccatcggcgaaaccgccggaggcgatgatcggcacgcgtagccggttggccgcggccggcagcaacaccaggccggggatgtcgtcctcgcccgggtggccggcacactcgaagccgtcgatggagacggcgtccacgcccagtcgctcggccttgagcgcatggcgcacggcggtgcacttgtggatcaccttgacgccgtgtcgacggaattcggcgatgtgctcgccggggtcgttgccggcggtttcgacgacgcggattcccgtctcgatgatggctgcgcgatattcggcatagggcaccggcttctgcgtcggcagcaaggtcaggttgaccccgaacggccgatcggtcagctcgcggcagcgggcaatctccgcagccagtgcctccgggctcggctgggtcaacgccgacagcgtcgccaggccaccggcgttggccaccgccgcagccatctcggcacggccgacccactgcatgccgccctgcatgatcgggtgttcgacgccgaaggtctcggtgaaacgggtcctgaacacgcccatggattgcctcctcggtcagatcgggtcccaggagaacacgtccgggctgcgcgccaggtccatgaagctgccgcgcaacgccggcatgccgtgctcggcgatgctctgcggggtccagccgtgctcgctatgcacactgcgcagcggccggctctggctcatcaggaagagttcgtggtgacgcgcggcgaacacctggccggtgacctcgcgggcggcgtcggacgccaggtagacggccagcggcgcgttcttctcgggggtcatgcgctgcagcttgtcgacgcgggccttctgctccggggttgcggccgggatcgagtcggtcatccggctccaggcgaacggcgcgatgcaattcgaacgcacgttgtagcgctgcatgtcgagggcgatggatttgctcaaggcgacgatgcccagcttggccgcggaataattggcctggccgaagttgccgatcagcccggaagtgctggtcatgtgtacgaaggcgccggcctgctgggtacggaagcgttcggcggcggcccggctgacgaagaagctgccgttgagatggacattgatcaccgacagccagtcgtcggcgctcatcttgtggaagatcgcatcgcgcaggatgccagcgttgttcaccacgatatccagacgcccgaaaccgtccatggcgcattcgacgatacaccgcgcgctgtcccagtcggcgacgctgtcggtgttgatcagaccttcgccgcctcgctggcggatcaggccaagggtctcttcggccggcgaggccgacccgccctcgccctgtagcgatacgccgatatcgttgatcaccacccgtgccccggaatcggccagggccagggcgatctcgcggccgatgccgccgcccgcgccggtaacgatcgcgaccttgccttcattgagtctgctgctcatgggtaatcctcttcgtcccgtggatgtcgttcggttgcgctcagcccggcaggccgaggacgctcttggccaggatgttgcgctggatttcgttgctgccgccgtagatggtggtcggccgcgactggatgaagatccccgccggatgcaactcggggtcttcggcgaagggctgcagcagggccgaatcctccccggcgacctccaggcccagctcgctgatgcgctggaacagttcggactggaagatcttcagcatggatacctccgggccgaggctctccccacgccgcaggcgttcggcgaaacgctcgtagagcgccttgtggctgtccaggtccatgctcagcgcggcgaagcggcgcacgaacagagggtcgtgccacagtcccaggtgccgggccaggcgctccaggcgctggagagcgaaggtggactgcttgggcgaaccgaggaagatccgctcgaaaccgagcagcgccttggccatgctccaaccctggttgattccgccgaccaggctgtcgtagggcacccgcacgtcgttgaaaaacacttcgcagaactcgccgtgcagctccaggttgaggatcggccgcacctcgatgcccgggctgtccatcggcaccagcaggaagctgatgccgtgctgcgccttggcgctgcgctcggtgcggaccagcaggaagatccagttggcctccgagcccatggtggtccaggtcttctgtccgttgatcacccactcgccgttttccaggcgcgcctcggtgcgcaggctggccaggtcggagccggcgttgggctcgctgtagccctggcaccagatgtcttcgccgctgagaatgcgcggcaggaagcgcgcccgttgcgcctcgtcgccatagcggatcaacaatgggccgagcatggtcacgccgctgtcgggcaggcgcgcgcagccgtactcctccatttcctccatcatgatcagttgcttgccggcgctcagccccatgccgccgtactccctgggccagccgggacacagccagccctggcgcgacaacagcaggtaccactcgcgggtttcctcgcgccccaggcgacggggcggattgcggatgcgctgcggatagttggcggcgatccactcacggaccatcaggcgaaaggcgttgtcatcgagactgtcgtagtcgctcatctcagtttcctctgaatacggggggacgcttggcgagaaaggccgccttgccctcggcgtggtcggcgctgagaaacaactggctctgcaactcgccctcccgctccagcaataggtcaaggccctcggcgagcaacgccttggtcatcgccaggggcaacggcgcctgctgctccacccgcccggccagctccagcgccatcgccaaggcgccgccagcggcgcagaggcggtccgccaggccgatgcgcagtgcctcctcggcctctaccacctggccgaacatcaggatctgccgtgcccgcccccaaccgatgcgcgccggcaaggtatgcaactggccgaggtcggcgagcagcccgaccttgccgaagccggcggcgaagcgggcgccggcgccgcaaacgatgctgtcgcaggccagcgccacggacagcccggcccccaccgcccagccctcgaccgcggcgatcagcggcttgcccatgcgcaccatctgccgcaccagccgcgcgttgtcctgcattcgcgccctgccggcggccaactcggtcacccgcatgtcgcccaggtcgccgccggcgcagaacacctcttcgccaccggtcagcagcacgctgcggatcgatgggtcgcattcggccgcctccagggcccgcagcaattccatgcgcagcgccggcgacagtgcgttgcgccgggccgggttgtcgaagcgcaacaggcgcaccgtgccgcgcgtttcctgcaacaaaccgctcatcaggccacctcccgctgtagcagcgcggcgtagcgcgccttgtggaacgccagcgagccgtgggcattgagcagtaccatggcgcggcgcaggaacaggccgatgtccgcctcgtcggtgtagccgatgccgccgtgcaactggatggcctggcgggtcaccagcagagccgcttccgaggcccgtacccgtgcgctggaaacctgccgctggcgctcgctttccgacgccccggcatcgatcgcggcggcggcctgctcgaccatggcgcgcgacagttcgatctggatcctcaggtcgaccatgcggtgctgcagcgcctggaaactaccgatctcgcggccgaactggcgacgtaccttgaggtactccagggttcgctcgaaggcgccatccatcagtccgaccagataggccgcgcaggccagcgctgcctcgtccagaacctgttccgttacctcgccggacaaccaccgtgccggcgcatcgcggaaacgcaggcgcgccaggtgagcgccatcctgggtcgcctcgcagagcagttccacgccatcggcatcgcgctcgaccagcgccaggccctgctcgcaggccaccagccaggcatcggcggcgccagccagatgtacgtgagcgacttcgccgtgcagccgcccttgctgcatacgagggcgccgccgcccatcgcggtaggcgatgcccgccggcaggaccagccgctcagcggccagcaacgcaacgcgctcgtcttccggcagcagcggcgccaccagcccggcctcgatcagcggctcgggcagcaggccgcgccccagcgcctccagcaacgccgcgtattcgctcatgcccaggccgctgccgcccaacgcttcatccaggcgcagcgccggccagcccatggcgcagacctcgcgccaggcctggcggtccaccccgctaccggtgaaacgaccgcggcgcacgcgggtcaggtcgccgtcgcgcggcaccagcgaagccgcgctgtcgcggatcatccgcagacgctgctcgcgctcgccggcccactcgtcttgctcactcatctgttcgccctcctgtcgatacgccgaccgcccgtccgtcatctgcacgggcggcgccggcttgtccgcgcggagcgaccgcgcaggccgtggtccggacgcgcgacggatggctccgctgccgcgccgccggaactccgctacggcttagccgcgcggtacctgaagctgcccgaggccatggcgatgacctcgccgccctcgttgcagatttccgccgtgcagaagcagatcgtgcgggtccgccgcaccaccctgccaaccgcacgaagctcgccgcgggcgctacccatgaagtgggtagccatgtcgatggtcaccatcgagcagtccggcaggcaggcacggatcgcctgggccatggcggcgtccagcaccgacatcaacaccccgccatggaactgttgcaggtagttcatcagttccgggcgatgccccaggcgcacccgcgccaccccgtcggcatcggtccagcgctcgaggccgatgaactcctggaagctggcgggccgctgctccgccgctggctgtcgtggaaaagaactcatggatgtgcactcctgccgcaggatcaggccttggccgcgctccgctcggcggtatccccggcactgcccggcgcttgccgtcgggaagcgctctcggcatcgcgggactcgcggttcgggtcgtagagccggtccgcaatgaacagcgccgggatcagcccggtgagcacgtaggtgatgcccatcaccaggaaacccgcgccgatcgacacgtgggtggccagcaggccgatgccggcgggcgccaccgccgcgccgatacgacccaggttgtaggcggtgcccaccgccgagccgcggacgcgggtggagaagctctcggtcatgtaggtggccagcaccccgaccggaacgccgtagatgaagccgaaggtgatgaggatccagaggatgttggagggcgagtggtagaacacgatcaacggcatgaaggcggcgctgccgatggccccggcggcgaaggtcaggcgccggccgaagagatcggcgcagacgccggcggcgaccttgccgaggatcatcgcgctgtaggtgccgaccatgtagccggtcatcgacttgaagttcatccccaactcgctctccaggtaggacggcatccagttgttggtgccgtagtagccgaacagcaggaagcaggaggtgaggctccagagcaggaacatgccgcgcgtttccggatcgcccagcatccgtcccagcgggccggcgccgccagcctcggcgtggctctgcggagccgcgccgggacgctggcgcccggcctgggccgcgagccaggacggcgactccggcacccagggccgcagggccaggcagaccagcgccggcgccacggcggtgaagaacaaggcgcgccagccgaactcggggatgatctgccccgccagcagggtcgccacgaggtagcccacggtccagccggcctgcatggcggcgaggatggtggtgcggtacctggttccgacgcactcggacatcaggatgttgcaggcgacgaacagcgagccgaggccgagcgaggcgacgaagcggatcagcgcgaactgccagtagttctgggtcagccccagcaacgcggtaccgatggagaacagcacgatggtccaggtcaccactcgcacccggccgaagcggtcgcagcaccagccgccatagatgccgccgacggccatgccggcgagagtcaggctgccgagggagccggcttcgaagttgctcaggccgaattcggccttcaggctgttgaggctgtaggccaggaacatcaggtcgacgccgtcggcgagcaggccgaggaagcagaagacgaaggcgatcagcatggtgcgccgggaaatggccggcgccgggttcggggaaagcgcggttgcattcattatttttgttctcgcaagcaggatttcggttgatcttcacggcagcccgacagtcgttccctcgcgccgccgcccttcgcttcagtccggccgctctggcggcggacctacccggccgttgtccagcaccaccacatcgcgctcgacgacgcgagtgcggaacgagccgtcgctccacatctcggtacgcaaggtctcgccgggaaacaccggagccgagaaacgcacctgcagatgtcccagttgccccgcgcggtagtcggcgagcccgcgcaacaccgcgtggaatgccacgccgagggtgcacaggccatgcaggatcggccgcgggaagccggcccgcagcgctgccgcgggctccgcgtggagcgggttgtcgtcgccgttgaggcggtagtacagggcctgctccggacgggtcggcaggtcgagtcgcaggtcgggtgtccgttcaggcaagcgatgcggcgtttccggcacctgccgggaaccaccgaagccgccgtcgccgcgaaggaaggtggtgctgcgggcgacacagcacctcgccgctgagcgcgtcgctgagcaccttctcgctgtagagcagcgcgcccttgtcggcgcccttgtctaccagaccggtgacccgggtccggccgatcacctcgccttccgccggcaacggccgccgccactccaggcgctgctcgccgtgaaccaggcgcagcgcgtccacgccagtcgccggattgcccagccagaagcccggatgaccgagcaccagggccatgcacggcaatgcctggagatcgcggcacggatcgacgtaggccagttggcgctcgtccagcgggtcgccgcccagaccgaggctcaatgcgtagaaggcgctgtcgcgccggctgtagcgctggcgtacttcggggatcgggtagttcaggagcacctcaggatcgagcgccatcggccacctcctcgacttccaacaccgcatccaccgcccaggcgccctggccctccggcaaggcgatgaccgggttgaggtccaccgagcgcaagcgctctcccgcctcccaggcgaaccgcgagagattcgacagcagccgtgccagcgccgcgacgtcggcccgcggccggccacgcgcgccgaacaggagcggcgcgcctctgatgctacggatcatcgcctcggcttcgtcgacctcgaacgggcagcggcggaacaccacgtcctgcagcacttcgacgaagatcccgcccaggccgaacaacgccaccgggccgaacagcggatcgcgctggatccccatgaagcactccaccccgccctgcagttggcgcgccaccaggacgccatcgagacgcgcctgcggcgccttctcggcggcccggcgcaggagcagttggaaaccggcgcgtaccgcgtccgcatcgcttacgccaagcagcacgccgccgatttccgacttgtgctggatgtccgccgaggcgagcttcagcaccaccgggtatccgatgccctcggcgaaggcaaccgcctcttcggcactgcccagcaccgcctcggcggcggactcgataccggcgcgcgccagcaggcgcttggcctcggcttcgccgggcgtggaggcgggcaactgtagcccgccggcaggccggcgcaggcgcaacggccgggcgaaggcttcgccgagccgccccatggcctggatcgccactaccgcccgggtggggtcttcgaacagtgcgaagccggcctcctcgtagggtgccagctcctccccctcgcccatcaccgagaccacgaacagacgctcgggatgagcctccttgatccgccggaactgctcggccagacgcgcgccgatggaggcggcggtgccggcctgggtgaagaaggcgagcagcgaacggtagccaccgtcgaccaccatcgactcggtaaagtcgcgcaccagcgtcaggtcgttcagggcctgcgcggtgcagtccaccgggttgatcggcgaagcgaaggacagccgtgccttcagccgctcctgggccatgtccggcatcggcggcatcggcaggccgacttcctcggcgacatcgctgacgatgatcccggcgccgccgctgacggtgatcatgccgaggctgttgcccaccggatagatacgccgggtggcgaggtaggcgatgtccatcagttcctcggtggtcctggcgcggatcaccgcatagtcgcccagcacggcgtccagcaccttgtcgtcgccggccagcgaagcggtgtgggacagcgccgcgcggctacccagggcgctgcgcccgaccttgtgcaggatcaccggcttgccggcgcgatgcgcggcctccagggcggcgaggaagctgtcgacgttgcggatggattcggcgtaggccatcaccacgtcgatctccggcgactccaccagccagccgatgctgtcgcccagggtgacgtcggcctcgttaccggtggccacgcagataggggttcccaggcggcgctggcgcgccatgccgagcaggtgcgcgccgtaggcgccggactgggtggcgatgcctacccggccgggcagcggtacgccacgttccaggctggtggagaagaacgcgtagtaaccgaggttactgttgaacgcgcccagcgcattcggaccgagcagacgcataccgtactcgcgggcagcggctaccaccgcatcctgcatcgccgcgccggcctcgccgacctcgctgaatccggaagagaacacgatggcactgcgcgccccctggcggcccagtgcccggacggtctccagcacctgaggcgcaggcaccgcgacaatggccgcgtccggtgcctgcggcagctccgcgacgctggcgaaggccggtagcccctggatttcagcacggttcggattgaccgggaggatttgcccggcatagccatggcgcagcatgtaggcgatgggtcggccaccgatgcgggtcgggtcgctggaagcgccgatcaccgcgaccgagcgtggttcgatcaatggagtaagactggcgaaacggggagcgtcgatgagctgttgcgagtggttcgctgacatgggttcacctgatccgtttgtctgtggccggcacgacaaccttctcgcgggcgagcgcgcccgcgggacgccgccacagcagcgcccggaaggcctgtcggccaggggtctagagcgtgtcgccggtaccgagcaacgcggttacctggctggacagcgtgccgccgttgccgtgcagcaacgccacgtcggccttggccaactgccgctcgccggcctggcggcggagctgggtcaccgcctcgatgatcaggaacatcccgtacatccccggatgcacgcaggacagcccgccaccgttggtgttcaccgccaactcgccgccgggcgcgatgcgtccgccctggacgaatgggccgccctcgcccttggcgcagaatcccaggtcctcgaggaacagcagggtgttgatggtaaaggcgtcgtagagcatcaccaggtcgatgtcggcgtgccgcacaccggccatctgcatggctcgcggagcgctttccgaggccgccgtcacggtgaggtcgggcatcgacacgatcgagcgatgccactgtgctccggccgcgccaaggaagtacaccggcgcattgggcaagtcgcgggcgcgctcggcgcgcactaccacgcaggcgccgccgccgtcggtgaccaggcagcagtcggcggcgctcagcgggtcgctgaccatccgcgcggcaaggacgtcatcgacgctcaacggcccgcgggcgaacgcctcgggattcaggttggcccattgccgggcagagaccgccacctcggcgagctgctcgcgtgtggtgccgtactggtgcatgtgccggctggccgccagggcataggcggtgatcgggtggcgcggcttgtagggcgtctcgtgccattgtggctcgctcatcgataccaggcggccgccggcggttcgctggttggagccgtagcagatcagcgcagcgtcgcagagaccggcctccagtgccaaagtggcctgcagcaggtgcagctcgaaactggagccgccgatattggtgccatccacgaatttcgggcggatgccgaggtattcggcgaccgacaaggtgggaaaggcatgggagctggtggcggcgaagatcgcgtcgatgtcggaaagcttcaggccggcatcggcaatggccttgagcgacgcctggccgagcagttcgatggcgctgtagcccggcgcctcgccgacgccggcgctaccgatgccgacgatggcggtcttgccacggatggctgcgctcatggtcgtccctcctggtggggaacgaacaccacgacattggcaccatcctgctcgacgatgcgcgcctgcacacgggtgccgatcggcaggctctggtgcccgtcgatccgcgacatcatgcgcacgccctcgtccaggtcgaccagcgcgacattgtgattgccgccgcgggagcgattgacagtgatcgcgtagagcgtacccaggccgctggcgggaacccactcgagatcagtctcgccgctacccggcaccaactggcgcgggtagaacacatggcgaccgctggaacggctgcgctgcaacatgaaacggccctgggcgagaaacgcaaggtactgcgcctcaggtcccggagtactgccatcgggaagatctgccacgaggtttctcctttgttcttgtcgacctttgctgcaaagtgcatcgcgctggacgccgaaccggatactgcttccgcccccggttgtacgttccggaaggccagaatatattcactatcgtgaatgtcaatcacaatactgaatgaaaagaggaaaaatgaccaaggacgccacaaccaaaggcaccagcagcaaagatgtcggcgcggtagtgaacgccattcagatacttcgccacctggcccacgccgacggaccgcaaggcgtggccgccatcgctcgcgccaccggtatcagcccgagcagcgccttcaatatcctgcgcaccctgagcaacgaacgactgacatccttcgacgatgcgggcaagacctaccaactgggccttggcctgtcggaactggccgtaggattcgtcggacgcagctatgccgacctgatccagccagagctggagcgactaagccttgcccaccacatcctcatcgccctgtggcaagtcaccgacgatgcgcacatccgcgtcatcgcccttgccgcaccgcccgtcgcccacgtcaacgtcgccgtcggcacgcgcctgccggaactggtcggcgccgccgggcgttgcattgccggcctgcgcgaactgccggaggacgaactgcgccgccgactgacccgcgtgcgctgggaaaatccgccgagcttcgagcgctaccaggccgaagcgaccgaggccgtcgagcgcggctgggctatcgaccaggaacacctttaccgcggcgtgagcatggtcgccagcgccatcaccgaccgcgacggacaaccgcgcttcgccatctccgcgatcggcatcagcgcccagcaccagcccgacgacctggaacggatcggcaccagcctgcgggataccgcgcgcttcgtgagccgcgcgctatttccccagggcgaggcactgaaggggaaatcctgaaatgacattcaacccactgaacgattagccggcccgccgttatcgacccgcgacgtcggtaccacctttcaacccgaggaccggcagataacggaggaagcgccagaatcgcttcagcgtcacccggtcccacgcccgcagcggcaccgagcggaacagctgccaggcatatcgcccatcctggacaacagccttcttcagcgccttgttcaggatcagttgccgggcccggcgataattcgggtgagcccgataaggctcgatggcttgcatatccgcctcgtaattgagcttgtacctgccggacagaccgcttccatgccgacgataacgccccatgtaggccggtagtcgatgaatttcatagccctgcgccgcgatcctgagggtgagctggaaatcctgcacgcgaatcgacgggtcgaagaaatccgcccgcttcatcgcgtccatgcggtagagcgccgtcagcggcatgaccaccagggtctcggccaatgctgcatcgaacccccaacgctccacacaaccctcgctgaaaccgtctcgcgccacttcgttaccggcactgtcgatacagatattgaaaccgcccacgcacccgacctcggggtgcgcaagcaagtagtcgacgcgcgtgtcgagcgctccaggcaggacaatgtcgtcgaggtcgggagtcatcacgaactccccccgcgcatgacgcaaaccgtgattgagcgcatcgctcacccctcggttagcctggcggtagagctggaaaccgtgacgctcgcggagcatggcgagacgctcataggtgtcgtccgtggatccgtcatccaccacgatcaactcgagattgggatagccctgcgcgtagatgctggcaatcgcctcgtccagatacttcgagatattgaaacaggcgcaaacgacggaaacgagcggtcgcatttcttcctccccagccccggctccgggactcggcacaaaccgataacctggctgtccgctggaaggaaaccgtgccatgcagctcggccacacatccgcggcgccttcaagcgccgggatactaagaagaaccgccccgaccatcgaaaccggcaggtcgcccgacccggcgctcgaaggacagaaaatcagaagcggtggagaaatgcgcgctcagcgcacccacgaaacccaggcagagcgggacgaccacccagaggagaaggaagggcagaacgaaggaagggcccgcagcattcctaggaaagctgcacgacctggccggcacccgaaaccatggcacggctttttcgcccgcccggcagaggggatgcccgaacgctcgccagaaaagacaaagcccccggaacgccaggcattccaggggctttgctcatatgtaatggcggagagatagggatttgaaccctaggagccattgctgactcaacggatttcgaatccgtcccgttcgaccactccggcatctctccgtgcggcgcgcatgataccagcttgtacgaagaacgcgaagctttcttgaagattttttcgcgttctttcagatggttgcgcgcattttgaggttaaagcggcacgcccaggcgcttggctacctcttcgtaggcttcgatcacatcgccgaggccctggcggaagcggtccttgtccatcttcttgcgggtttccttgtcccacagacggcagccgtccgggctgaactcgtcgccgaggacgatctggccatggaacaggccgaactccagcttgaagtccaccagcagcagaccggcatcgtcgaacagcttgttcagcacttcattgaccttgaaggaataggtcttcatctgcgccagctgctcgggagtggcccacccgaaggcctggacgtgggattcgttgatgaacggatcgcccagggcgtcgttcttcaggaacaactcgaaggtgggaggagtcagggcgatgccctcttccacgccgaggcgacgcaccaggctgccggcggcgaaattgcgcaccacgcactcgaccgggatcatgtcgagcttcttcaccaggcactcggtatccgacagcagcttgtcgaactgggtcggaatgccggcagcttccagcttctgcatgatgaaggcgttgaacttgttgttcaccgcgcccttgcgatcgagctgttcgatgcgcttgccgtcgaaggcggaggtgtcgttgcggaacagcaggatgagacgatcggcatcgtcggtctggtaaaccgacttggctttgccgcggtagagttcttcgcgtttttccatgatgggctccgcttacgggtaatagggcctaggcgatctcgcgccaatccaggcctgaatgctgatcggccacctgcagccagcccggatcgcacccaagggtgtcgacgaaggtttgccgggccagctgcggcgagttgttcttttcgctgagatgggccagcaccaggtgctgcatgcgaccccaatccagctgcttcaccagttctgcggactgatggttgttcaagtgccctcgcgaaccgcctacgcgggccttgagaaaatagggatacgggccaccggcaagcatcgtgctgtcgtggttggcctcgaccaccagagcatccaccgcacgatagcactccagcacctcggccgtggccattcccagatcggtgagcatgccgaagcgccgctgcccatcggacagcacgaactgggtaggctcgcgggcgtcgtgcgagacgccaaccacctgcacttccagcccgcggatcgccaggcgctggccggccctcaacagctcggcggggtgcaccgggcggcgcatgccgctcagggtacccgcactgagatagaccgggatttggtaatgccgcgccagcagttcgacgccatggatgtgatcggcgtgttcgtgcgtgaccaggatcgcgtccagctgcgcggggctcagccccaggcgcgccagacgcttgatgatttcacgcagcgggaagccgcaatcgatcagtatccgggtgtcagaactgctcaccaaggccgaattgccccggcttccgctgcccagaaccgcgaaccgcattgcgcatgctctcctggagtttttccagtacgttttgcgcgacatcggccggcgcagaggtgttgatgtccttgtcgacggtgacctgcacggcgtcgctgacggtggtcaggcggacctggtagcgctgcgccttggcgtcttcctcttccttggtcttctcgccgccgccgaacaggcgactgaagaacccgggcttgtcttcgtcgggcttcttcgccccttcggcgatgttcacgtagtacacgccaaggctgcggttgaggtcgtcgacgcggatatcggcgttatccagggcacgcccgacactgacccaggagcggtcgaagtcggattgcaaggtcagcaccgggttgccgctgccgtccttgctcaactcgaaggtgccgggcgtgtcgtagatcgagttggctgccagcagggagaccgagccgccctgctcggcgctgcgcgccatgctcgcgaccatctcgtcgagcagcgccgcgtcgaggctcggcgccaccgacttgctcggccagctcgggctgctggtgtcaccggcggcgcgggtctggctgagcacgtagacctcgctggtattgctttgcacgccgggctcgatacgcacccgaacccgtgcctggccgtccggctcgacaccgctcacgcggctgctaaggcggcgtgccagcggcgcggaaagctgcgacagcgattgccagtcggaactgaactcgccggtctgcgggcgctcgtcggcgatgcggaaaccgttctcctcgaagaactgccgggccaccggccagacttccgccggcggacgctgggccacgacccagcggctatcaccgctgcgctgcaggctgtagtcgctgatgtcgccggcgttggccagcggctgcggacgcggaacctcgtactcaccctctttttcgtgggtggtggcgacgttcagcggaatcggcagcagcggatcgagcggcttgctgtgcaccccttcgggcaattgcatgggaggcgtttcgcgggcgccgaggtagtcgtcaccgcggtcgcggaaatagccctccggcccccacagccagccgcagccggaagtgttgccgataaccagggcgagggcggtcagtccagccagtcgcttcattgcgtggagctccttgatcaagccaatacgccggtctggcgcatggcctgacgcagcggctcgtggcaacgcgggctgagccaggtcaggggcaggcggatgccctcggggatcagacccatctcatgcagggcccacttcaccggaatggggttggattcgatgaacagcgccttgtgcagcggcatcaggcgatcgttgatggcgcgcgcggctgcggcgtcgccgcgcatggcggcggcgcacaggtcgctcatggcgcgcggcgcgacgttggcggtcacggagatgttgcccttgccacccagcagcatcagctcgacggccgtggcgtcgtcgccggaatagacgaggaagtccttgccgacgcgctcgatgacttccttggcgcgttgcaggtcgccggtggcctccttgatgccgatgatgttcggcaccttggacaggcgctcgacggtctccggaagcatgtcgcaggaagtacgcccaggcacgttgtagaggatctgcgggatcgcaacggcttcggcgatatggcggaagtgctggtacatgccttcctgggtcggcttgttgtagtacggcgtcaccagcaggcaggcgtcggcgccgccgcttttcgcggcctcggtcagcgccaccgcctcgcgggtggagttggcgccggtgccggcgatcaccgggatgcggcccttgacctggtcgaccacgcgacggatcacctggatgtgctcttccacgtccagcgtggccgattcaccggtggtgccgacggcgacgatggcgttggtgccttcctgcaggtggaagtccaccagcttggcgaggctgtcccagtccagtcgaccctgagcatcgaagggggtgaccagtgccaccatactgcccgcaatcatgcaaccgctcctgccgcgaaattaaagcggtaatggtactgtcggcggcaggccttgcacaagacgagcgccacctcgtcggaagccgctgacaggcggcagacgtttccctcggcggcgcttttcgctacccttcccgctttaggtacggcccgtgccgccagcgtattccaggaaagttgaatgtccaccagccaaccccgcgaacaattccttctgatcagcgccctcggccccaatccgatggagctgaccaccctgctctgccgcgcctgcgtcgagagccgctgcgccgtggtcagcagccgcctgacccgccacggagagttcagcgccctggtgctgcagatctccggaagctgggatgccctcgcccgcctcgagggcagcctgccggccctcaccaagcgcggcgacatcaccctcagcatgacccgcagcaacgcccacgtgacccgcgcccaggcgttgccttacgtggcctatgtcagcgcggtgtatcgcccggacatcctcaacgaactctgccagttcttcatcgaccacaacatcgagctggagaacctgacctgcgacacctaccaggcgccgcacaccaacaccaccatgctcaacgccacgattaccgtgacgctgcccgccggcacccagatcagttggctgcgcgaccagttcctggacttcgccgacgccctgaacctggatgccctgatcgaaccctggcgcccccaacacccctgaggagccgagccatgccggtcgcaatcgacaaacccgtacccgacttcaccgcccccgcaaccagcggcaaggaggtgaccctgtccgcgctgaagggcaagcaggtcgtcctgtacttctacccgaaggacagcacccccggttgcaccaccgagggccagggcttccgcgaccagtacgcggcgttccagaaggccaataccgaggtcttcggcatctcccgcgacggcctgaagtcccacgagaacttcaagtgcaaacaggaattccccttcgagctgatcagcgacaaggatgaagcggtctgccaactgttcgacgtgatcaagctgaagaagctctacggcaaggaatacatgggcgtcgaccgcagcaccttcctgatcgacagggacggcgtactgcgccaggagtggcgcggcgtgaaggtgcccgggcatgtcgacgcggttctcgccgccgcccaagcgctcaacggcacctgagccccgccccgaaaaaaaaggccgcatccgcggccttttgcatttttcatgcggccgatgctatcgcgtggctgccggagtctcgggaaggtccttgggccaggcatccagcaccgctttcaccagggtcgccagggggatcgcgaagaacacgccccagaagccccagagcccgccgaacagcaacaccgcgcagatgatcgccaccgggtgcaggttcaccgcctcggagaacagcagcggcaccagcacgttgccatccagcgcctggatgatcgcgtgggccaccatcaggtagatgaactggtcgctccagccccactggaagaaggcgatcatcgccaccggtacgctcaccaccaccgcgccgatgtacggcaccaccaccgacaggccgaccagcagggccagcagcgctgcgtagttgagccccaggtaggcgaaggcgatgtaggtcaccgcgccggtaatgacgatctcgatgaccttgccgcgaatgtaattggcgatctgctggttcatctcggcccagacctgtttcatcagcccgcgctcgcgcggcaggtagcggtggaaccaggtatggaagcgcttcttgtccttgaggaagaagaacaccaggatcggcaccagcaccaggtagatcatgacgttcaccaccaccggcaggctggccagcgacgaggtcagcgcccactggccgatctggccgaattcgccgcgcgcggtctcgatggccttgagcacctgctcctcgctgatcaggctgggatagcgctcgggcagcatcagcagcacgctctgccattcgccgagcatccgcggcagttcgttgaacagggtgaacaattgctgccagagcagcggcagcaggaccaccaggaacagcgccagcaagccgaggaacaggctgtagaccagccacacggcgaacaggtgcggcacccggaagcgttccagcatgccgaccacgccctggatcaggaaggcgatcaccatcgccgccagtaccggcgcgagcatcccgccgaaggcgaggatgacgctgaagccgagcaccagcatgatcgccagcaccactgcctcctcgtcggagaagtagcgctgcatccagtcgcgtaacaccttgatcatcggaaatcctgaatcggaacggcgaaggctccgctaacgcttgcgcagccagtatcgatagacgccttcggcggcctcttcgcgcagcagttcatggccggcgagctgggcgaaggcccggaagtctcgctgcgacccggcatcggtggcgatcaccttgagcaccccgccgctgggcaggcggttcagctccagcttggcctttagcaggggcagcggacaattgagaccactggcatccagctccgcgtcacataccaggggggatgaatcgttatccgtcatgacagcctctcccgaagggccgacaagcatacccaagcctatccgccgctggccagttgaaacggcgctcgaagtccaacagcttcgggtctcgggcagatacctaggcagtgccgataaccaacggctaaagtaaggcctttgccaacctgagcctcctgcatgaatgtactgcgccctgccctgttgacgctcgcctgcatgctcgcttcgccggtcatgtcggacgatctgccctccctgggcgacgcatcttcctcgatcgtttcgccggagcaggagttccagctgggccgcgcctggctgagcatgctgcgcaaccaggtcgatgcgatctccgacccgcagctcaaggacttcgtcgaaagcagcgtctaccggctggccgaaaccagcgacctgcaggaccaccggctggccttcatcctcatccgcgacgcacagatcaacgccttcgccgcgcccggcggcgtgatcggggtcaacggcgggctactgctcaacgcccagaccgaaggcgagtatgccgcggtgctggcccacgaactcggccacctgatccagcgccacttcgcccgcggcatcgaggcacagcagcgcatgcaactgccggtgatggcagcgatgctcgccggcatcgtcgccgcggccgccggcgcaggggatgcgggtatcgcggcgatcgccgggacccaggcggcggcgatccagaaccagttgcgcttttcccggcagaacgagcaggaagccgaccgcgtcggcgtcaccaacatggttcgcgccggttacgatccgcgctcgatgccgaacatgttcgagcgcctggcgcggcagtaccgctacgacggcaagccgccggagttcctcctcacccacccggtcaccgaatcgcgtatcgccgacacccgtaaccgcgccgaacagtatccccagggcggcaaggaagacagcctgcgctaccagcagatgcgcgcgcgcacccagttgctcttcgaggaaaccccggggatggccggcaagcgcttccgcgccatgctcaacgacaatcccaagctggatgccgcgcgctacggactggccatctcgcagacgcgcatcggccagctcaacgatgcccgtgacaacctcaggcaattgctggcgaaggcacccaacgacgtggcctacaacctggcccaggtcgagctggacatcaccgccaaccgccttccggatgccgatcagcggttgaagaagatgctcgcccagttccccagcagctacccgctgaaacaggtgcgcgccgacctgatgctgaagatgggcaagccgcaggaatcggagaagatcctcgacgacctgagcaaggcgcggccgctggacccggatgtctggaaccgcctggccgaggtgcgcagcctgaccaacaacgccatcggcgtgcaccaggcccgtgccgagtacctgtctctgaccggcgactaccaggccgccatcgagcagctcgatttcgccaagcgccgcgctggcggcaacttccaactggctgcgcgactcgacgctcgccagcaggaaattcgccaacaggaaaagatggtcaaggaaatgttccgctgagcggcatatccgaggaaaaacacccggcgaagctcatcgaaacagggggttgggcgaacaaccgcaccgcgcttactcgccctacgcagcgggacgccctcgccaggatcaggcgttcccggcctggcgcaggcgcgcggcctgggtgaagtcgagcatgcgcttgagcggacggaccgccctcgggatcaacgccgggtcgacgaagatttccccgctgccctcgcgcaggcaggccagggtccgctcgagcgtgttcatcgccatccacgggcagtgcgcgcagctgcggcaggcggcgccgttgccggcggtgggggcctcgatgaaatccttgtccgggcacaactgctgcatcttgtagaagatgccgcgatcggtggcgacgatgaaggtcttgttcggcagggtctgcgcggccttgatcaactggctggtcgagcccacggcatcggccagcgcgaccacgctttccggcgattcggggtggaccaggatggcggcgtccgggtagagcgccttcatgtcttccagctgcttggccttgaactcctcgtggacgatgcaggcgccatcccagagcagcatgtcggcccccgtctcgcgctggatgtagcgtcccaggtgctggtccggcgcccagaggatgggctcgccgttgtccatcaggtgttcgacgatctccaccgcgcaactggaggtcacgacccagtcggcgcgtgccttcaccgccgcggaggtgttcgcatagaccaccacggtccgttccgggtgctggtcgcagaatgccgagaattcatccaccgggcagcccaggtcgagcgagcaggtcgcttcgagggtcggcatcagcacgcgcttctcagggttgaggatcttcgccgtctcgcccatgaagcgcaccccggccacgaccaccgtctgcgccggatgctggttgccgaaccgggccatctccagcgaatcggacacgcaaccgccggtctcctcggccaacgcctggatcaccggatcacagtagtaatgcgccaccagtaccgcgttctgcgccttcagttcggccgcgatcgccgcgcgatgctcggcgctctcctgctcgctcaacacacggggttgcttggcggccaggtgggcctgtaccaggagtcgttcggaaatgtgcgtcatagtcgctacacctgaaggcgcaacagcgcgtctctcgattttatacccggcggcaggctggaccgcagggaactgacgattgcaggtttcgggcacggcacccgtgtccccttgagcaaaccccggggatccgcctgcaaggccgcggattctaaccgcataggtcgcgccagggccatcccggcatccgtaccggcctggccggtggctacgctaacaaaagacataggtttcggtcgttagacctacgcgacataattttttcgtttcttagaaccgtctatagctcggctcgctccacgaccgaacacgacatgccggcatgccagcgttaatactttggtattaggcccttggtattaacgttaaataaccggtaaatatccggattttcttttcgtcgaatttacgagcaatatgaaacatatttcgttgaaataagctcttctttcacataattataaaaatatcctgaaacagagccgtcatccctcacctccaaaacgacgactccccgtgccgtgcacccgccgcgcagaaagcgagccggcggccgattccaccctcgcacgccagcccttgcgcttcactgaccgacgggaggtttccccgatgaaaacgtcatccagaagacaagttgaaacactcgggcgctatctatcgagtcctcgacgcttcttccacagtagcggcaacctgacccgatcaagggaagcggcacgcgccacccaataaaaggaataagggatgcctattcataacctgaatcacgtgaacatgttcctccaggtcatcgcctccggttcgatttcctccgctgcgcggatcctgcgcaagtcgcacaccgcggtcagctcggcggtcagcaacctggaaatcgacctgtgcgtggagctggtccgtcgggacggctacaaggtcgaacccaccgagcaggcgcttcgcctgatcccttacatgcgcagcctgctgaactaccagcagctgatcggcgacatcgccttcaatctcaacaagggtccgcgcaatctccgggtgttgctggacaccgccatcccgccgtcgttctgcgatacggtgagcagcgtactgctcgacgatttcaacatggtcagcctgatacgcacctcgcccgccgatagcctggcgacgatcaagcaggacaacgcggaaatcgatatcgccatcaccatcgacgaggaactgaagatctcccgcttcaaccagtgcgtgctcggctacaccaaggcgttcgtcgtcgcccatccgcagcaccccttgtgcaatgcctccctgcacagcatcgcgagcctggccaattaccggcagatcagcctcggcagccgctccgggcagcattcgaacctgctgcggccggtcagcgacaaggtgctcttcgtggaaaacttcgacgacatgctgcgtctggtggaagccggcgtcggatggggcatcgcgccgcattatttcgtcgaggaacgcctgcgcaacggtaccctggcagtcctcagcgaactctacgaaccgggcggcatcgacaccaaggtgtattgctactacaacaccgcgctggaatccgagcgcagcttcctgcgctttctcgaaagcgcccgccagcgcctgcgcgaactcggccgccagcgtttcgacgatgcgccggcctggcaaccgagcatcgtcgaaacggcgcagcgccgctcaggcccgaaggcgctcgcgtaccgccagcgcgccgcaccagagtagagcgttctccagcagacgctggccgtgggtggtgagaatcgactcgggatggaactgcaagcccagctgtcgattgcgcggatcggccatcgccatgatctcgccatcggcatcggccaggcagtcgaaaccttccggcaggcgactgaccaccagcgagtggtagcgcgcgacgcgcaggtcagcgatgccgtcgaacagcgggtgacgctgatcgaaacgcagggacgtgctcttgccgtgcagcggcttcctcgcctcgcccaccgcgccaccggcggccagcgccagcgcctggtggccgaggcagacgccgagcaccggcaagcgcccgcgggcccaggcgagcaattccagcatgcagccggcgtcttccggccgaccgggccccggcgacagcaccagcagttcgcaaccgtcggccagcaatgccgcctggatcgtcggcaacggcgtatcgttgcgcatcacccggacctccgcgccgagcaggcagaactgctcgaccaggttgtaggtgaaggaatcgaagttatccaacagcgtgatgcgcatcgcgctctcccctttcgcgttcggcagcggccacggcggtcagcaccgccagcgccttgttgcgggtttcctcggcctccagccgtggatccgaatccagcaccacgccggcgcctgcccggacccgggcgataccttcgcggacctcggcggagcggatgacgatgctggtatcgaggttgccggcgctgtcgagaatgccgatcgcgccaccgtagctgccgcgatagccatcctcgtactgccgcagcaactgcatggcacggaccttcggcgcaccgaccagggtgcccatgttcaggcaggcacggtaggcatgcagcgcatccagttcgccatgcagttcgccagccacgcgcgagaccaggtgcatcacgtggctgtagcgatcgaccttgagcatgtcgcgcacctgccgcgtaccgctgcggcagacccgcgccagatcgttgcgcgccaggtcgaccagcatcatgtgctcggcgatctccttggcgtccaggcgcaactccgcttccaggcgattgtccagttccgcatcgatggcgccccgggcatcgcgtccgcgcgggcgggtgccggcgatgggatagagttccacctcgcgactctccgcgtcgtacttcaatgccgactccggcgaagcgccgaacaggcagaagtcctccgcatcgaggaagaagcggtacgggctggggttgcgcaggcacaactggcgataggcccgccatgggtccgcacacggcatgctgaagctgcgcgacggtacgatctggaacacgtcgccggccctcacgtgggcctgcaggcgctctacctggcgggcaaagctcgcatcgtccaggtcgacctggtagttgccggcccgtacgcctgccaccggcgactcggaagcctcctccacggcgccatggaattcgtcggcacactggcgcaggctggcggccaaccggtcgtgcccggccggatcgtggacgaacgcctgcagcgaagtccggcgcgccaggtgatcgatgtccagcagcaactccggcaccaggaacaggtagtccgggcaatgccgcgcaggttcggccggcgccggcaagggttcgaactgctcggccaggtcgaagctgaacaggccgcccagcagcgcgggcccctccgcgtcgcccagcgttccgagcacgcggcgcagcgcctccaggctggacaggccatacaggcgtcgccactcgtccacatgcgactcttcctgggggaagcgccagtgcagggtgtcgccgtcacgcaagcaggtgacctgggccggacaggcctcgctcaacggcgccagcaaggcgcgtccgttggagttcaacgcccgcagcaccacatcgcgcccccagcactcgatgcgcaggcagctggaaaggatcgccacgctacgccgcgcagccttgctgtccacgtcgaagcagtcgaacagcatccggttggcgccggccatgcgccagatcgacagcgcctccggcaccagcgtgcggtactccagactttcttccagtcgatagccaaccccgctcacgagccacctcctcgcgcccatgggcgactggcctgcgcgacgctagcgcgcaacggcatgttcatcatcggtaccccccttttcccccaattgcgaccgctgccgtcggcggcgatcgccgcaatggatgtcccgtctcagtccagaggcagcgcctggcgggagagaatctccagcatccggcgcatgctccccaggtgcagttcgccgggcaggaagtcgacgctctgcccaccccaggcgcggtgcagctcctcgctcagttcgtcgagggattcgcccatggactggcgccagagcaaccgccggcacaggcgcagacactcggtataggccgactcggccccatccgcggccagccgcccccgcagcaggccgccgtgtcccgggatcagttgcagcagggtcggcagacgctgcagacgttccagggactccaggtaagcctccatgtcgtcgaacaccagcggccgccacaccccctctgcctcgtcgaactcgcccagggcatcgccgcagaacaggcgtcggcgtcgcacgtcgtagaaaaccacgtgatcgtcgctgtggccgtgggcctctatgacctgcaggcgatgccgcggtcccagctccagccactcgccgtcggccaccgcgcgaaccggcagagcgtcccaggcacaggcctcgggcaaccgctgctccgcacgcaacagttgccggttcaagcgctcgaccacccgcaccgcgctttccgacttccaggcctggcaggtccgctcggacgccaggacctgtacgttcggcagccgcggacacaggtagggcagcaggccgcagtggtcgtagtgcttgtgggtgatcagccagtagtgcacctgggacgggtcggcgacccagcggcacaggtccgcccaaaccaattcggcatcccggctgatccctccttcaaccagcgcccagctcgcctcaccgagacgcagcaggaacaccggcacctggacgtcccccaacaggcacaggtcatcatccagttgaccgggagccgaaagcctcaacatggccggttcacctcctcaggtttgcggtacagcgccgcgccccaggtcgcgccggagccgtaggtcaggaccagcacccgctgtcccggctggatgtccggccagaacatcgccagcgtgaccggggtcgaggccgaagccatgttgcccagacgatccacggtcaccgcgaacttgtgctggggaatgcccagttgctcctgtaccgcatcgaggatgcgcaggttcggttgatggcagatcacatggtcgatgtcgtccagggtcagctcatgggccgcgagcatttcgccggcgatccgtaccagggtctggctggcatgctcgaacatcggccggccgcgcatgaggaactcgcccccgccctcgcgcaggacattctcgtcgaggaaggtcggcgaggcactgcccggcgccgcagtcatcagcaggtcgaagtagttgccgtcggcgcccaggcgcaggtccagcaggccgtcgtcgaggctctcgccggcgctgaccaccactgcgccggcaccgtcgccgagcaggatcgacaggttgcggccgcggtccgaacagtccatgcgcttggacagcacctcgccgcagaccaccaggacatgccgtgccagcccggcgaggatctgcccgcgagccatctgcaagccgtacagcaacccgctgcactgtgcccggatatccagcaccgggatgtgccgcaggcccagcagcggctggatcaggcaggcctgggacgggtcgtggtggtccggcgacagggtgttcaccagcaacaggtcgatgtcctccggcagcagcccggcagcctcgatggcctggcgcgccgccggcaccatcagcgcgctgaccgcctgttccggctcgacgtgatagcgggtgcgcacgccggtacgttcgacgatgaactcgtccgacgtattgatgcgccctaccaggtcatgattgctgacctggcgtttcggcaggctgaaacccagcccggccaggatcggattacccatgtgcagccctcctcggacaccgtggttcaacatggcgatgcctcagcacaccagcacctcgcccaattgccagacctgggcggcgaacccccagccagtggctgcgccggccatgacgatacgatcgccggggcggatcttgccctcgcgcaggccggtcatcagggtgtacgggatggaaacggagatcatcacgccggtatcgcccatcgtcagttggtactgctcaggacgggcaccgatgccctcggcccaggccttgaccaggaacggcgctggctggtggaagacgaaataatcgatgtcatcgctgcccaggccggccttttccaacgcccggcgcatcgcgatcggcacgttggtcgggacgaagctggccatcttgttctggccgtcgctaaacaacgagaaatacagccgcggcttagcctcgccggtcgggttttccggcaggcgccagcgaccggtggccacttcatagaacgtagcgtcgctgtgttcggccgaagccagcaggtcgcagctgtcatcgtcgccgcgggtcagcagggccaccgcgcagccatcggcgaacagggtcgaggtacgcgaggtgaagtcgagcaggttggagatgtactcgctgcacaccaccagcactttctcggccttaccctggcggatcatgctcgctgccaggcgcaggttgagcaggaagctggcgcactccatctgcgaatccaatggcagcgcccgactcaggccgagctgcttggacagcacgttggccatgcgcgggtagagacgtccgcgcaggtccggcaggacatcgccggcgtcggtcatgatcggcgaggaagccgaacagatcagcatgtccacgctatccggcgcggtatcgctgctgcgcagcaggcgctcggcggcccggaccaccaggctgaactcgttctcgccgttccgcgggtcgaaatagccccgccgattgacgccccagaattgccaccaggactcgctgaggtccggtaccgcggcgaacaccggatcgtcgttttcgtagctgcgagccggaagttcacaggtgatcgctgccagtttgaccttatgcatgagcttctcccgccagttccagggtcacgccctccaccaccatgccgaacggatcgaagctgatcagcagcagttcatccagacggtcgcgctgtgccgcgcgcagttgcgacgccagttcgaacggccccaggcaacgaccatcgggccgtccctggccgaaccattcctcgcgcacccagttcagttgcgggaagtccccggccagacgggtgaatccggcgcgtaccgcttcgggcaatccaggttgggccggcaggttgaggtgtcccttgacgtcgcctacctggcgaatatcggtattcagcggaatgctcagcggcagccattcctgcgccggatcaccgcccagcgcaccgcgacggaacgcggccttgccggtcggccggcagagcagcgccagggcgccgtcggcaagggcgaagccggactcgctgtccacttccaatccctggctggattcgccgcgcacgaccaggacgttgcgatagccctggtcgctggcgagggtatcgaccacgtagagggcgcgggccaggctcgagtcggtgaggtcgaagacatgcgcgcgattcgcgccgaggaccttctgcaacggatggccaatcttcggcgccatgatgtcgcggttctcgatcagatggtcgggagacagggcgaggccgacgatcaggtcgatctcctcgggcttgaccgccgcctcgtccagggcttcgcgaaccgccggcagcaagcgctgcatcagcatctcgtcgccctgggcgcgagggcgttcgcctcccagcggcccctccagacacacataggatgggggcaggttcacccccacagcctgaatcaacatgcccgttcctccggaaggttgtcgtgataaagggtgtcggccaggtggcgcagctcggcgcgcgccaacttgccgttgtcgttgcgcggcaaggccggcagcacatgcaattggctgggcagcatgtgcgagggaatctgttcggcgagatgctggtcgatgcgctgcgccagcaggatctggttgtcgtccagcggagtggccagggtgacgaacagggtcggacgcaagccgtcgtgcagccggcaggtaggaaccagaaccgcctcgctcacttccggcagatgacggcagatcgcctgctcgacctgggtcggcaccacccagcggccattcaccttgaacagatcgtcttcccgcccacagtgacggtaggcacccgactcgtcgcgctcgaacaggtcgccggtgcggtaccagccacctgcgaagcgcgcctgctgctcttcgctggcccgccagtaacccggactcagcccagggccacgcaccaacagcacgccttgccggcccgcttcctcgatagtgtgtccttcgcggtccaccagccggcactcatagccaggcaacggcagcccggtgctgtcggcacgcgcctggcccgggcggttggcgaggaacacatggccgacctcggtagccccgatgccgtcgcagatctccagcccgtgcgcggcccagaattcgaactcgccgcgcggcagcggcgagccggcggaaaacgccaggcgcacgctgctcaacagctccctggcctgcggacgcagcgaggcatagatggccggcaccccaaacaggacccgggggcggaaggcgaccaggttctccagaacccgctccgggctcggccaggtatcgtcgagcagcgccgaggctccgctgaaccagggaaagaacaggctgttgcccatgccatagccgaagaacatcttgggaatcgaatacagccggtctcccgcctgcaatgccagcaactccgtagcgaacgcccggcagaaaccgagcgtgttgcgcaggctgtgcatcacccccttgggcgccccggtggaacccgaggtgtattgcaggaaacaggctgccgccgggtcctggcgatggaaggcactccaatcgaggtccgcaggaccgaccagcgcgtccagcgagaaatcgtcgagcaaagggcgtccggcggccgcacgcagggtcaacggcgccaaaggaccgctcagcgacggtgcatcggcttcacgcaccaccaggctggcctggcagtcggcagcgatatcggccagggcctgctcgcgggacttgggattgatcacggcgggaatggcgccgaccgcgatgcaggccaggaacaggcaggccagcgaaggcgagtcgttcaacgccagcaccacgcgatcgccgggcttgagcaggcgggccagttggctggcctgggagagaatgtaggtccggcattgcagccggctgagagtctggccccgatagtgataaacggcggtatcgggatcgaaatcgaggcggaacagaacctcggtcaggttggccaatgtggacatgacagaacgttccctcttcagcgatatgcatccggatcaggagatacctgagccagagcgcttgctttgtcaggaacgggaaactagcggcgctgggcgaagcgcgatattcggagtccgaacgaaaaagtttcggggagaagaaccacgggcttcgtaggccgcggcaatcggcgcgatccaaaccgcgagaaatttggcacacccaccgggctgcgcgggatccgagaacggcaaccaagcaagaagggcggcagcctttttacgcaagagcccattggccagacaaaaaccgttacaacccttgctcgaggcctcgtccgaacccatgagatggcaaaccaatgacaacccactttgctcggcaaatcgcctcccagatctcacagttcgaggcgctcggcctgggctccaagggggcgacggcatgcctggaagcaggcggccatccatcgggccgatagcgctccgccccgcctcgcctgccatttgcaggcttccctgttgaaatcccattgcgtagtacactgggcgagcctgccgaagaggacacctacatgccccatagctacaggaaaatggaatcgccggtcgggacactgaccctggtagccagggacgatgcctttctggtcgcgattctttggcagcatgagcgtcccaaccgggtaccgctggacgagatgcggctctccgaggacagctccctcctggcggaaaccgaacgccagttgcgggaatatttttccggcaaacgttcccggttcgaactcccgctcgacttccaaggtaccgaatttcagaaaaaggtctggtccgccctgctcaccattccattcggcgagacccgcagctatacggaaatagccgtgcagatcggcagccccaacgcagtacgggcggttggagccgccaacggacggaacccactgtccattgttgcaccttgccatagggtgatcggagcctctggcggcctcaccggtttcgccggtgggttggccgccaagcagtggttgctgcgtttggaaacccgaggcaggacaccagacctgttgagcatgatcgaggacgagtgagctgccgcttgccctcgcgcccggtgttcaccggaaaaatcctcgccttttgacttgacccgactgcagcggtgacatttcagatcgaggaccgacggcaactgagcgcaactcgttcgtaagtcaggtccttgttcctgggcggcaactgatagtcgacggaacaggagccatcgctccagcgaatggacaggcgcccctggtcctcgataccgaacaccagcaaacgggacaggttgtcgaccattcccacgacccgctcttccttgtcgtatgcctgtgcaccgaagggaatctttcctccagagtccatgctcaggtcgaactgcacccgccgaccggactccgcggagaaacgcttggcgatcacggcgccccgggtcggcacggccatttgcgtgctgtcgctgatctcggtatcgcttccaagggtattggtatccaggttcacccagttgtaacgatagggttgcatgtaggggagcacggcatagccacggccgtcggtgcgaaccgaagagtagccgtcgaggccgacgccgccgacctccggaacctccaccaggccgaacgtttcccccaccggctggccgaaggtcactccccccgaatgcaccactaccgaaccgcttgctcccaggttgatctgcttgttgtcgcgcccctggctgtaattggcggacaacttggccttggacgtgtcccaacccaggccgacgctgccggagttgccgccgtccttgctgtagttggcctgtgcgctgtagttgaacgcattggcttcgtccaggtatccggagataccggtgttcaggctcgaatcaccatgctgtgaactcacggcattggcatatacctgactggagcgtgcgctaccgcccaaggggatgctgacggaggccgtgaactgggtatcggagcgcccgaacgaacccgtctcctgggtacgggaaaccgccaggctatagctcgcgcgcttgatgccgctgctgaagccgaactgcacgcgacggctgctgccggggcgattccaatatgtggtttcgcccgccgtgagatagagcgaactgcgtcggaacagcgtctggttcaccgtcaggtctatgcggctcttctgccgactggaacttgagccatagaggtagctctcttcggacatgtcgtcgatatgctggctgagagtacggtagccttccgtggaatagcgatagcccaccacggtaaagctggtttcggtggcgttgatggtcttggaatagagaagccgcagactctgtccctggttgcgcccaccccgccgcgtgcgggactggctatgggtcacgtccgcagaaaaaccgcccaggggcgtgttgaagccgaggcccaggttggtggcattgtacttctccgcagcgagcaggccgccaaagccggtaaccctgtcggacaagccatacacagccgacccctggagcaggttgaccgacggctggccatcattatggtactcaccggcggccaggccatagcgcaggttccccttgcgggtcatgaccggcaggtaggaataggactgcttgaaggaccgctggcgtccgtccgcctcgatgatcttgacctccaggtcgccattggagccgctgggatagatgtcggtgatctcgaacgcaccgggcggtacgttggtggaatagatcacgaagccattctggctcacctcgaccgtcgcattggtttcagcgataccgcgcaccaccggggtatagctgatctcgttgtcgggcagcatgccgatatcggattgcagttgcacgccgcgcatacgcacgctctcgaaagcatccccctgagcggaggtatacaactcgccgagggacaaggtccccttcagggcacgaatgtcacgttccacataggtacggttgctactgaacttgttgcgcatgccggtacctccgctcagggaggagtcgttgcgcagacgccagccaaacaggttgaagccgttgcgcaggcccaggtagcgataatcgctgttctggccaaagttggtgttgcgcgtgaagttggcctggtagttggaaaacaacgcggtgacaccgtcatcccaaagagagggatccacatagccacgcgagtgccgctgtacatacagctgtggaatgctgaccagcagggaaaggctgttgacgtcgaactcgatggatgcaccggggatgagttcggcgacattcaggggcgtattgttttccagattatccggaatgagtttgtctcgcgtcagccgggcgatatcgaccccgatctccttgagcagccctatccggacgaccggacgaacgcttccggtttcgggatcggcactgaacacgacatcttcgcgccggatcatgatctggttcaaatgaatgtcgacgctgtaagtgccgggcgacaccgagttgccgttctcgaaatacttcagttcaacaggcgccccgccctcgttgttcaggaactcggcgttgaattccaccgcgaaagttacggcaggcaaagccaatcccaaggccatgagacaggaagacctggaatagacggacaactcgaagtcgaactttttcctaaatatggccacgcgaatattccttggactaatttccgacaaaacggaaacacccatccataggggaagttaagagcagttcttctgctcttctactctgctcttctgagcttcagtcggataaggagctggagtgtttatcgagtccgccatagtcatttacgctctggaactcgacatttccagaaacgccggatggagttcccttgatttcgaatcggcgactcgacttcggcgcgaccatgtcggcatcaacaacatagtaggcattgccagcttttaatttcacgctggctaaagagacatgaaacgcagtatcgttggaaacttcgacaaccgactttccaccctgacggacaagacgccagttcaactttccaggcgcttcggcggaagttcccgacaagttatcgggacggtagaagaccttgatacgctggcgcaaagctatctgcaacgtattagccgaggcagatttttgcggaatttcctggacgttcaggcggaatacggattccctgtcgctcggcaagccttccccttgaaacaggatacgcagggtttgctgcttgttgcctcccaaacgactgagggcaggcgtgatgacaaacggaacctcacgtttatctgccccattatcagcctctacccaggattgaatcatcacgtccttggaagcctggttcctgaccaggatcgcagcctccttggcaggcgcctgcagaacgacccgggttcctcccagtgtgattcccgcattggccagggtggaaaaaagcaaaaggatgccaccccagataactctggaagaaaatggatatttcatgatgaactcgcacctcatggaacggggtatatacataccccgcccacgtagcagaacttagttgtattccagggtgaacggcagggagccgtcggcactaccagccgtaggagctacggagccggatttgacataagcggcacgcagattcagcttggcactgtagacagtgatgtcattgccttcgccatctttttgtaccttggaatccaggggagcatcgatggtctcgttcgccgacaggttcagcagcttgccatcggatccatagataccgatgccgacaccggtggcggtgccgacggttttcagcaggctctcattgttcgggtcaatagtgctcccagacatcgggttgaacttcagcttgacggtggtcaggccggtaccggtcttgccacagtccaggttcaggttcaggctggtaccaccagcgatgctgccgcccgcggtgccgcccagcgagtcgatgctgatcttgccaaggtttacgtcgatggtctggttgcccgcagcaccgccaacggtggtgccggcaccaccagtgatgctgcaagcggccgcggtgatttcacctttgaaattgatggtgccgtctgccgccatggcattgccgacgaccaggctggctactgcggcagccagaatgcttttcatggaaatggacacgattgagcttccttttgacagtgaaagtgttgcgatttttgaactctataagagccagcaacattctccgaaaagccgaatagaacgacaacgaagcacttcccaggcaatcgtgtgaaatctccccagtgcttgtatgaagtttcctacaagcggaaaaaacctcgtagttaaaaaccctccgacaccataagcccgctaccactaatagccaaacaaaatgaacgatccgaaagaagcgcatcagcttcgataacgcctcttatatagaaaaatgaaaaaccaagacaaaccaaagcaaacccagcaggctcccaattatcccattaccccagcagcaggcgcggagcttacgggaacgggaaatccatgctggagaatagatgcgattcaggttaaggagaaacctgaacaacttctgaaacctctatctggtccgatctctagagctttgccaattcggttgagatactgatttcgaacgcacttagtttgccttccaatgaagaggccagattggctatccgctcggaagactccgatgggttctggcaagccttttcaaggcaggaacaagactcgaccaataggctgctgcccaccaccctcgcagccccttttatcctgtgcgcaagttcggccactccttgcaggtctgcgagttcaagcaattccgccaaccgagtacgatcatcccgactgctggccaataaagtttccagcaaccgctgcaatgcagccggctcgccgccggtaatggcctccagcgaacgaatgtcgaaaagactttccatcggcgattccgaaccaagctctttcatacagactccatcgatatgcttaaaggaaggtcactgcgcgttgcgctgtcccgcctgcgggactccaggcatccgtagaacgacaaggccgtacatgccgtccgggccagttatccgcaagcagcataagggaattgcctccgcctctgccgtccaaacaggggagcatcgcttgttgcgtctcctcgaacggacccaaacggccctggaaacgctcatggccggcacggagtctacctttgccagccgaccgcagccggcccgaccgctcgtttcggggagggaaactcctacggtaagtctgtgcgaagaggcgtcatcggttgcgaccgcctgacggttcgaagcgaacctggcggaggagccatcgctgcgacaggcgagtctgggttacgcgcaggtcgcgatgaaacagcggcataagccactattggcgcacacaggcatacgaggaagacgcagggaacacctggttgaaaaccagctctacagatcatcgagcggcgagggttctatctatggcaaatccattggacggcttgcacgacgcggaccacgcgaaggccgaaaaaacggaaggaaggatgccatcggtcagcgatcccagggcgcttgcccgtcttctggaattgatactgtccaccgcccaggccggtctcgccttctccaaggaccgcttcgacatcggacgctttcgcgcgctccagcatgccgtcgccgaattcatcgccagcgaccagggggtagcgtacgaacgggtcgagaactggatcgctctggacagccactacccgaccccgaaactggacgtccgtgcgttgatcctcgactcgcaacagcgggttctgctggttcgggaggcctcggatagtcgctggaccctaccaggcggctggtgcgacgtaaacgagttgccggcagatgcggtagttcgcgaaacccaggaagaaagcggactggaagttcgagcgatacgcctgttggcattgctggacaagcacaagcatccccaccctccccaactgccgcatgcgttgaaagccttcttcttctgccacgtcaccggaggcagtcttcaacaacaaacggacgaaacgtcggcggccgagtacttcccggtggacgccttgccgccgctttccgagcaccgggtactggcctcgcagatccagacgttatggcagcgaatccacgcggaaacgccagaggcgcttttcgactagccccccgacctcatggagtcatcgcgcggcagacggcctgaccctaacgacgtccagcaggcgtacccggcagatcgaccggccagtcgacgagcgcctgccgccctcccccatcgccggcagcttgatgccgccaacagcggcgcagcgtgccttccgagcagtaaagccggcccgtcgttctcgttcgaatgcgtggcggagcgcacccgaggcgccagccatcgaccatcccgaacgtgccgatggagcgaactccgagcgagttcccccgcttcgtccatagctcatctgtgctagtcgaccctcaccttgggctgcacctatgattcgtcccttggatgaccctccgcggtcgggaacaagacattcaaggacgaactcatgggcaaaccattccttcacgctcggcgctggctgctgccgctcaccttcatctgcacggcaacgactgcggtcgccgaaagcaccggcgactactggatcgtctacggcaagggcgaacgctacaacaacgaggtattcgtcgccaacgccaccggcatcttgcagcaacccaaaggtatccagtcggcgcagatcatccagctattcgaagaccggtcgatgccgacgctgacggcctacgaggtccagttcaagtgcaaggagcgcagggtccgcttcgacaacgcacgcgccatgcgccgcatcgacaacgtcatcaccaacgtgaaaaccgtcgacggctggatcgacccggggaaatacgattactggctgcaacgctcgttcgctttcgtctgcgccccggccatccgcgacaacaaccagatgttgccgctgggcaagatgcccattgcacgcatggtgcagaccgtccaggcaatgttcgtcgaactgcagggcgtccaggccaagaaacagaccatgcgcgatctggatgcgatgctcggcaacgagtagaaatgaaggaaggcggcttgccgccctcctccggagccccacggagcaggtcagcggcatgccgctcgcagcgtcctgccggccgtagccagcgccgcgacgaatagccagaatgtttctctatgcgaggagcgcgcggagctgcgcggggacctccatgacttcgcgggtatccggggagacacagacctgcgtcaggctcgcagtgaacgccaccacgtccggcgaaagacgtccttcgactgaaaacgagaaagaatgcgtccccacgttcgacacgcccacctgcatcgtgagctcgtcgtcccaggtgaccggatgcaggaattccagggagaacgctctcgccgggggaagaatcctgaaccccaggagggttctgagccccgggccgcccagccagaccccgagcgcctcctgcaccgcttccagcacaaagtatgaaaaacgtggcgtatagacgatcccttcgggatcacagtcgccaaacagtaccgttctctttatgaaaaccggggtcggcatcgggtcactcatccggtcgccaggaaaggaacctcactctatgggagtcccggtccgctgacaaatcctcggatagccgtgcaccagttcaccaggctgcgcggggtctgacaggaacacgccagaacgaacgggaaagcggctgccagtaccgatatgactggcggaagcgcgaaaccggccttcttcccgatgtcgataaggataagagttgcggtacgctggggatgagatatccggacttcggaaacagaaaagcccgccttgtcgggcgggcttttcatatcgactcggtcgattctggccagtttcctagccaaggcatactgcagctccgaagctaaagttgtgagctctacggatatctacagaaactcctttctaatatggtgggtcgtgtaggattcgaacctacgaccaattggttaaaagacaattggcctaggtttctctaggaagggtttctacccagccacctttcacaccagcagcctctaatgaccccacattagaggctgtagacatgaatgcgaaagcgacttcggttgtatccaccaagggtggtgtagggaaatccaccaccgccgccaacctcggtgcattttgcgccgatgctggcctgaaaaccctcctcatcgacctggaccccgtccagccctccctatcctcgtactacgagcttcctgaagtcgcccagggcggcatctacgacctgctcgccgccaacataactgacccagcgaggatcatctccaggacgattatccccaacctggacgtcgtgatttccaacgaccagaacaaccagctcaacaacctactgctccaggcgcccgatggccggcttcggctggcaaacctcatgccgtccctgaagcagggctacgacctggtgctgatcgacacccaaggtgcgcgctccgctttactcgaaatggtcgtgctcgcatcggatctggttgtttcccccctgcagcccaacatgctcactgcccgcgagttcaaccgcggcacaatgcaaatgctcgatggactacgtccctacgagcgcctcggcatgcggatccccaatgttcagatcgtcatcaactgcctggaccagaccaatgactcccgggcgattcacgagaatgtgcgtgccatcttcgatgagcatcaggacatttctgtgctcgaaacgactgtcccggatgccgtcgtgtttcgcaacgcagcatcgcgcgggctaccagcgcaccgcctcgaaacgcggcaaccctcgaatcgcacatccgcgcccgcgctggaaatcatccgtaacctggccatcgaggtctttcccgagtggactgaccgcttcctcgcgctgacgccggaggcggtagcagcactggtcaagggagggcgctgacatggcgaagcctccaatcacccaagcccgcgacgtcgacgcagaacttgtgctgcaactgaacaagttcggcagcgccgccgaccttcggagccaacaggccaagttgaccggcgctgcgcgagaaatacgcaagctgactggtggcggtactgacctgttcgggaagctgggttgctacttgagcttcgagcaaaagcagctcctacaagacgctgcgcgcttgctcgactcggtgaaccagcaggtcgagcatgcgaaggaaaagcgtgatcgcgacgagaaacaggccaagaagcggcgtgagctgcgcgggcgcctggccaagcaactggtcgcctcgaactacccgcttccgggaaatacgctcgaagagcggctggaaatcctgcagatcgcgttgatctacaaccgggccaaggtgttcgatcccctgtactccacgcaccagctccactcaaaactcaaacgctggctggagcgtcccaagcagctcatcgggtggcgcagtgaagccgagtatttcgctagtcaggtggggagcctgcgatgtgacttcattagccacctgactaacgaaatcgcctacgacgatggcagtgaagtcgaggagcgcctgcgcgtcatcaagcagacggtcgctgactgcaccgcacagatcgctctgaccagcgaggagcaggaaacccttcggctctggaaagacgctctgcaatcggctccggagggcctcatatgaacctccagaaccgcaacaacctcatcctgagcttgatcgccgagacccagttcgacgcctacgtgcaaggctacatggccaaagcaggcgccgccgccggtgcttccgacaatctgctggtcgaggctgaaggtgctgcgatgctgcagggccttgtcgctccggttcgcgctcagcagcgtgcctgtggacagcccctgcagaacgccctgctccaaatcgcccacgacctactgttgcagacgaagtcgcaactggccatcgcggccaatgccagctcgatccacgtgatccagcgggacatgaacagggctatctggaatatcgcgactgccatcgatcacctggccgagttcgcccaaccctcccaggacactgtgaaggtcatcgagcggctgatgctcttcgtcggcagtagcccggaaggtcagcaactggccgcagaggcaagtgcggtgcttggcattagcgaggggggcctggcatgaagcctatgattcaagcccacctggtcgagcgcgaccagttcggcttctggacccatccgaactatccggatctggccgacaactgctcttccaacgaagcgcaggaaacgctgcgtcggcttggccttgagttgcagaccgtcttcatggagtcggatgcgcctcgcctctacgactctgcccgttcggaccaacgatacagcgagtggatcccaacgcggcccgaaggcgccggttggttcgtgctgtcgatccacgataccgataacggcccggtgtgccagtacgtgcgaccgctcggagaacacctgagtccaatcgatctcgatgcggcagcagaacagcatgagcgcctgctcagcgaggcttgtgccaaggccttgaatcagcgcgacgccgccctggccgaaatcaagcgcaacaagctcaccatcgcggccatgaacgaggtgcacgcgaaactcgccgcagatctggaggccgtccaagccagggttgcggggttgcatcgcgctctaaaggtgatcgttgacgctgcagaacacggttcttggccgacaaccgtcctgcacgggattgataaagcacgtgccatgctcgccgccgccccttcccaagctaagcccagcaccgacgacgggcagggaggcaggccatgagtgaccccaagctcaagccctgcccgctctgcggcagcacgaacattcgaatgctggaacccgagctgctcgacaccgatgcctggaactctgccattgaatgccaggactgccaggttcacatcgggccgtcctactgcgagccagacccggtaacagcgaggtattcagcacaggtcgactggaacaggcgcccaaacgcaaaaagccacgcggacgagcgtgagcagttcttgatggccaacctgctcgccgccctggaggtcgcactgggcgacgtagcagccctggctattgtcgaccgggtaaggcaggtcgcagaccgaatttaccccacctcgagcctatcccctgttccccaagcatggctcgatgtccaagccgagcgccgccggcagatcgaggccgaaggctggacgccagagcacgacgacgagcacagccacggccagatggcccgagccgccgcctgctacgccctggccggctccagcgctccgaacgatggaaccgccgccctgctggtgtcgctggcatggccttgggatgagcagtggtggaagccaaccacggtgcgacgagatatggtcaaggcctgcgccctggcgctggctgagatcgagcgcctggaccgcaccgcgcccgtgcagggctcaacctgctgcaagggggacgcgtaatggacaagcaaaaagtcctcgccaaggtcgagaagctgatggccctggcgaatgccaagggggccacgccgaacgaggcggaaaccgcattgcgccaggccgcgatcctgaagcgccagttcgacctcagcgatgcggatatctcggcccacacggtggaaaccgcgtgcattcccactcgaaccaggcgctctcctgccccatggctgcatgaactggccgggatctgcgccagttccttcggctgcgactacctggccgcttacgcgatgccagcgggctggacgttcaagttcatgggtcgtgggatcggccctgagctagccgctcacgcctactctacgctccaccaccaactggtggcggcgcgctcagctcatgtcgcccaacagaagcgctgcaagctgtcgaccaagcgccgtcgcagcaagctcttcgtcgaaggctggcttctcgcagtgcgttcgctggtacgtgactttgccggcaggccggacgagtcgactcaagcagccatcaaggcctacctcgaactacaccatccggagctgaaactcctggagccggcagcgccgacgaagcccctggcctatgaccaggcttcgctgcacgcaggctgggagcacggcaaaaacactcgcctgcaccgcggcgtcagccggcgagttcagggcgcgctcgagcagggaggttcccgatgactcgctctgctctctcgaacatcgcctacgaggctctggtgcgtgcccgccgcaaattcagcaaccgaaaggagcgctgcatccgcgaaacctggaccgccgaacaggaactggtgctgctgcgcctgtatccggatatgccgaacgaggtcctggcagccaggttgaacaaaacgctccagcagatctgctccaaagcgtatcggctcgggctgaaaaaaagccccgagttctccaagaagatccggcaggactggggcagcgcaactcggttcaagaagggaaacaccccatggaactgcggcatgaaggggcttcccgcgcgaggacgctcatcggaaacgcagttcaagaaggggcagaagccccacacatggctcccagtcggcagtacacgggtcagcgctgatggctacctgcaacgaaagatctcggataccggttatcccccccgggactggaagggcatgcacatcctgctctgggaagaacacttcggccccatcccaaccggccattgcgtctgcttcaaggacaacaacaagcagaacgtcgtcatcgacaacctggagctcatcacccgggccgaacgcatgcgccgcaactccatccatcgctatccacctgagctgaagagcgcaatccgcgtcatcagcaagctcaagcgcaccattcaggaggtcgagcatgaaaaacaagattgaggatctgcgtaatcacctctttgccaccatcgaaggcctgctggacgaagagaagcctctggatatcgaacgcgcgaaagcggtggctcatgtgagttcggtgatcatcgagtccgccaaggtggaggtgaaagcgctggagatcatcggcgccccgggcggaagcacgttcatgcagatcggccgggaggactcgaagtgagtgttctggaacttacgccgccgcactccgtcgaggcggagcaaggggtactcggcggtctgatgctggacaacgcggcatgggacattgtcggcgatcaactgcagaaggaggacttcttccggcatgagcatcggctgatattcaccgccatcagcgagttggccgcgaaggacgccccgtttgacgtcgtgacggtgtcggaagcgatcgaagaccttccagaagccggcgggctggcctacctcggccagctcgccgacaacacgccctccgtggccaatatcgaggcttacgcgcagatcgttcgcgatcgggcgcacctgcggcagttgatgtctctcgggcaccactgcaccagaaccgcctcgaaccaccaggcgaatccctgtgaggttcaggaggagatcgagcagaagctgttcgccctcggccaagatcagcacaagtccgactttatcgatatcaacaagggcctcgcgaagatcgtcgacaccatcgattaccgcttcaacaacaacgtgacggtaacgggggtcccgacaggcctgaaggatctcgacgagctctccggcggactacagaagtcggatctcatcatcgtcggtgcccgtccctcgatgggcaaaacgtcgtttgccctcaacttgatcgacgccgcgctgcagagcgaccaacagaagtctgtccaggtttacagcatggaaatgccagcagagcagctgctgttcaggcttgctgccctgctcggccacctggaccttggcaagctgatgaagggccaactgcaagaggaggattggcctaggctgtctctcgcgatccagcgcataaacgactatggcagccgtctggtcatcaacgaccagggcaacctgacgccgacagagctgcgcgccaaggttcgccgtgcagccaggaaatacggccaccccgtactgatcctggtcgactacctgcagttgatgcgctgcccaggcctggaaaaccgagccaccgagatctcggaaatctcccgctcgctgaaagcgctggccaaggagatggactgccccgtcgtggccctatcccagctcaatcgcagcctggagaaccggccgaacaagcgaccgaacaacgcagacctgcgtgagagcggcgcaatcgagcaggacgcggacgtgatcatgttcgtgtaccgcgacgaggtctaccaccccaacaccgaggccaagggcatcgccgaaatcatcatcggcaagtaccgcaacggcccgatcggcaccgtccgcgccgccttcatcgccaaccagacccgcttcgccgaccttgcaccaacttggcagggagctcttgcatgagccccttcattgaacttccgatctctcgccggcgggagccggcaaggagtctagtcatgcgtgaccagcagcccgctaacaatctcctttcgatagcgagcgccgaatggatacaagccttgcagaacttctgccaccacggacgagtgtatgacgggtccgccgccaatgcctggctattggatgcctgcctacttgttcccagcgctgccctcatccacggtgtcatcgagtacgttcttaacagccgtgaggacataccatacggagggctacgcccaagctgggtggctcagcggctcgagcaggagggattgattagtcaccggtgcggggcagtcttgcactggcaggagcacggctatcgcttttccacggtggtcaggatcgaccccgaacagatttggcccgataagcgctcgagacccgaagcattcgttaccggaccactagatagccaggagcttggggtaattgaaatcctggcgcatccgaacgccagacgtcgtagtccgtccccggtgcgcctggcagcactggttcgatcttcgctagccatacctgctgagcctcttcatcccattgcaaatccgccagttcttcatgcagtgctagccacctatcccgaattggcatctcccgaatggtttccagtggccaggagtagcgacgcatgagcgcatactcaatggcatccatgccccatagcctccagcctttgtcacgtgccagtgagttaccaagggtacacagcacaaagacttggcttatccattgcgctctggccatcgtcataggcaatccgtcccccttttgtgagtcaggaacgcatgcctggatctggataagcatctcgtcgtatccaaagcggtattcgttcttcatgccggacctcctgtggtctgggtgggtttgtttggcgacgccaaccttaccaccggatgcgtccggctcccttttagcagcgaccgtcacgccttcagcgctaccggtcctgcaatctcatttttcatctcatcttccgctgccagttgccggcccacgccggcaaggagtccacgcatgaacgcttcccagcacctggtcacccacgagtgcatgaattgcggtcagcaccaccctctccacctggtgcgccaaatcctccccgcagagaacaccccggaaggtgaagctgaggtcttggtctgcccctgctgcgggagctacgacgtccatcagttggaggctgtccgtgatgaacactgaagcccgttttccgagcatccacgcctcggccgcgttcaccgactcggcggtggttcatgccaatcacgttggggtcaacccgatcgagctggacgccctcagccaagtgatctcgcgcctttctcgtgacgagagcacggtcgcacccagctcgatggagcgagagcttcgtgagctggaggaactggggtacatcgaaatctcgaccactcaggccgggaccctggtggtcactacgcgcgctccagggcaactgctttcggcttacttctggtcggtatggatcccgcgatacctgttcagttgctcgctgaaagtgagcctggtgccgcacctctgctgcggcactcaggactcccagcacctcaccgcggtgttccgcattgcaggcagcaaggacgccgcacgtgagttcctgcatcagttggccaacaactatcccgggcatgagccggagttgcccgaactggtggccgttcaggtcggtgatgcactcagcaaggaggccgaatcatgaaggcatcccagacctatcagtgcatcgtcaagttcgatggcgccggcttctggaccaataccattcagaagcagcgtgcgacctgcacctggagcgacaaggtggcagcctcccgccttgccgaacggctgttcggcgaggacaacgcctacatcacccgtatgccggcacaggcaggcgaccacgaaaagcgcatcgagagccgctgggaactgtcctgtagaaatcccaaggaggtagcgcacgatgcctgacgtcaccgcttaccggccggctgaggacgagctcgctcaactgcgcacagaggtccgcatgctgcgttccgcgcatgacgacctggcctgcagccgacagagcgatcgtcgcagccttcaggcgctggtgaaacgtctcctggatgccgccgccaccgatagccttccccgctcccttgcagagatggagacctggctgcagctcaacagtgaggagaccacggatgcgtagtttccttcgcggcgcccgggaaagcgtccgccggctggtggccttcgctcaagccgaaggctggagcgtcgaccgctccgccggcggccacttgaagctcagcaagatcggctgcgcctcgatcttcatctcttccacgccaagcgacgcgcgcggcgagctcaatgcccgcgccctgctccgtcgagccgacaggcagcgttccctgaaccaggagtctttctgatgcctatcaaacacgccatcgtccacctgatcgagaagaagcccgacggcaccccggccgtgctccacgcgcgcgacgccgagctgggcgactcccaggccatcgagaacctgctggccgacctcaacgaaagctacaacgccaagaacaaggcctggggcttcttctacgacgagtccggcgcctacccgttcagcggctggctcggcgagtacctggacggcggccgcgacttcgtcggcttcagccacgaagcggtcgagcacctgcagaagctgatggaaaagtccaacctctccaccggcggccacgtcctgttcgcccactaccagcaaggcatgaccgactacctggcgatcgccctgctgcaccacagcgaaggcgtggcggtgaacgaatcgctggaggtcaccccgtcgcgtcacctggacctcggccagttgcacctggccgcgcggctcaacatttccgagtggcgcaacaacaagcagtcgatgcagtacatctcgttcatcaagggcaagggcgggaagaaggtctccgactacttccgcgacttcatcggctgccaggaaggggtggattcgccgagcgagacgcgcaccctgctgaaagccttcagcgatttcgtggaaagcgagggcatggccgagcagcaggcccgcgagaaaaccgagacgctggtcgactacgccacctcccaggcgcgcatcggcgagccgatgaccctcgacgcgctttcggaactgatggacgaccagcagccgcgggcgttctacgactacatccgtaacaaggactacggcctgtcgccggaaatcccggcggacaagcgcaccctcaaccagttccgccgcttcaccggccgcgccgagggcctgtcgatcagcttcgaggcgcacctgctgggctccaggatcgagtacgacgaggagcgcgacacgctgaggatcagcagtctccccactcagcttcgcgaccagctcaagcgccgcaaggcggagcaggagagcacgtcatgaaaggggttcgtcgcccaatcctgcgctaccacggaggcaagtggaaacttgctccctggatcatccagcacctggcgccacatcacacttacgtcgagcccttcggcggcgcagcctccgtcctgctccggaaagcccgcagctacgccgagatctataacgacctcgacggggacgtggtgaacctgttccgagtcgcgcgggatcacggtgaggaactgcgccaggccctggcgcttaccccgtttgcccgggaagagttcgaagccagctacgcggaaacgtccgatccgctcgagcgcgcgcggcggatggttatccgaagcttgcaaggtttcggtaccgcagctgcgtccggcgaacgtacagggttccgctcaacctcgaccagatccggtaccggacctgcactggactggcgcaactaccccgacacgctgaccgcgataacagaacgcctgcagggcgtggtgattgagaaccgcgacgccctcgcgctgatggagtatcacgaccggccgaatacgctgcactacgtggatccgccctatgtccactcgacccgcagcacgaaggtgcgccacaacgccaccggcaagtcgtaccggtacgaactggacgacaaccagcacaaggagttggcggcattcctcaaacggctgcgcggcatggtggtgctctccggatatccctgccccctctacgacgagctctacagcacctggcacagagtcgaccgccacgcctatgcagacggctccagagagcgaatcgaatgcctctggctcaacagcgcagcgcttgaggggttggcacaactggatttcttccaggccagtaatgcgtctccatcgccctcattccagaccacggccgctcattactgagcgatctgcaggagaacaacatgaagaacgttacttcgatcgaccgcaaacacgcagaagacaagtttgttgtacgcatgccgcaagggctccgcgatcaactcaagcaaaaagccgcggataaccaccgctcggccaacagcgagatcgtctaccggctggagcgcagcaacgcgctcgaagaagaactcgctcgagcgaaccgaatggtcgacgagctcttcgccaagaaccagcgtctgcaggcagagctggctgcggcgaacacgcctcaggtggcggaggcatgagtatggccaagatcaacccgcaagatctgaaagaccggctacttgcccctggtttcaccgcgccgcccgttcttgagcagttgtcggacccgatcagcgacacccccatggtgctgacactcgaccaggtcctcccctggcacgataacccccggaccactcgaaacccgaaatacgatgagctgaaagaatcgatccggcatcgaggtctcgatacgccgccaccagtaactcgacgccctggcgaagacaaataccgcattcgcaacggcggaaacactcgcctggaaattctcaacgagctctacaaagagaccggcgacgagcgttacttccgtttcaactgcctgttcaggccctgggacaagcagcgcggcgaaatcatcgcgctgaccggtcacttggccgaaaacgatttgaagggtgacctcaagttcattgagcgagctatcggagtaaaaaaagcgaaagtcctttatgagcaggaaagcggcggtgaaaacatttcccagcgtgagctggcacgtcggctaaaagcggatggctacccagtatctcagtcccacataagcaaaatgctggataccgttgaggtcctgcttccagccattccaagcatgctgtactcgggcctgggagttgatcgtgtctctcgcattctctcactacgaaaggcttccctgggctgctggaaacgcctttactccggcgagggtatcgacttcgagatgctgttccaggacaccctggcgatcttcgacagtagccctgacgagttcattttcgagcgtttccaggacgaactcatcgaccagatgaagcgtcccttgggccttcgctatgatcaaatcctgctcgagatcaccaacggccagcaggagcagcgccgcggcactctggtcgacctgcccgcacctgccgcaccacctggaatcccagccgtagggcaggaaaatcctgctgcgtcgactactggacaagcacaatcacagagccccgctgccggcctccaaacgtccaagaccaatagcctcccgggtaatccctctaccccgccaactccgccactacctgtacaacagcagcaactgaccgacgaggagcgtgctgaactcttggcaggtcatatcgtgagcccggtatccaccaagattcagcagactcgccaacggctggccgctctcgagggtgaacatctacctgtcttcgaggaaacagctctgcaggcaatcccggtgcaagtcggcggcctgcacccgatcaccgacctctggtacatcgagcggtcgatcgacacccccgaaatcctgcgacagcacatcgctgacttggtggaagaaattgccgttatcgtcggcgcccccggaacgatcgagaggattcaaggtggtgtgggctactcgtaccgggagccagcagaagattgcgaactttctgaggcagccctgcacctgatcaccttgtttcagtctctcagtggccaggtccaggtaatcctggacaaggtcgactcgcaaacttgtcgtgatgctctgggtgaattccagttctcagctggcctcgctcagttgctgctgggccaacccaccacaggcgatcagccatccagccaggcaggccgtcttaatgacgaagccctggtgaaactgttccggatcattcgtcttgcccggcgcctggttgaccttgagctgccgccggccacctccgagcaagcagctaccgaccagtgatttcgcacgatttggggagggatcgacatgtcgaagtcgttgatcaatgaagcggtcctgacgcaggtgatcaaccacctgcgcaatgggcagttcaaacgctgcgccgaaatgggcctgaagccagaaattctggctcagctacaacagccgttcgtcgtgagtctcctgacgaataccccggtgtcttgggtcgaggtgagggtgaacaccgacgtcatggaaaaaatcctggccaccgcagagcgctctcagcaagaggagctgcaaattgagcgtgctctcaaactcggggctaccaccacgatgattcagagcttcttcggtctgtcgccggaagacactgcgatcaagcggctgatcatggagatacacccccgacggggccgctggcgtcagctcgacggaacactggaacaccagatctggtatcgctgggatcacttgatgcaggagaaccaggtcagcctggacgatagcttggcgcttctcgacatcgccatgatcttgaccgaggaaatcaacgcaggcaccgatcaggatagcccggagttcataagcctcgccgttgtctggtggctcattcagagctggttgaaagacggactctattcgtctgacaaatcgggtcaggcccaagcaagtcatcccaggtctccgacgactctttatctggccagcatcagctcacacctgccccactctgccccttccgcaacaacgcaggtgaacgctgagacagaaagtcaacaacaactgaacctggttcagtcggaaggcgacacagcaccatgaggctgtcgcgctttcccatctcgactctgctggattcggcctcgggacatctcgaggcccatttgtataagaagcggcttgctgccgagagcggcgaaccgctggctcaacagtattccggcatcattttcagcggcaacccgcatgagaccgttcctcggcgcctgctgctggataaacgcctcaccccgctggagcggaactgctggcaagtgttccgcttgctcatcaacgacgacgggctgaccgcgttcccgacatacgagcaactgcgcccttatctcggcatgcagccgggcaagatcgcctcgcgcgaaaccatagccaaggcactcacggttcttcgattgacacgctggctcagcctcggccgacgcctgcgcaacgacctcaacgggcaagtacagggcaacgtctacatcctccacgacgaaccggtatccccggcagaagccctggagctggaccccgactacatgcagttgctgagccaatccaccgaccacggcaaccgagccatacgcgaagtaggacaggtcacctggagggaattcagggacgatccggacgttggtcggcgcctgccttcccacctggagaagcttgaggggcgcttgaaccatcagcagtgggctctcgatagtcagctcgaagcggatccagcggcagagttcggcatccgaactctgcccgatttacctcattccaccccgagttcggatgccgaactcagtgaaatcagcggcaagcgatgcgctctaccgctgagttcggatgccgaacccagacagaatccgccgagtacacccttggttcggatgccgaactcatatagtacgtatacatacaaacaagattctgtatgtaaaaagccagtacaaccgcgagcacgcgaggacgcacatccgaactggcaggatctcctgaacggactggaggccgagcaacggatccaagccgtaagcgcgctccgacgggtgtccgaggagctgcgtcgtccggtcatcgagcagtggcggcaccgatgtgcgggaggaagtgtcggtaaccccttcggctacctcatgacgctcatccagcgtgcagtccagggcaagttcaacgcctcttgggctccggaagaaatagcggaacgcccctgtcgtgctccggcaccaccaagccccacaacgcctacacagcctcagattcagccaaagggagacacccggacagggagcgaggtcctcagccggctcaaggacctcattcggcccaggcacggatcgagcgtgccatccgaacggggtgacgagccatgaaaaactcactgtcgagcatgttggttttccctcggggcggagccgacggtgagctgggtgattcggcccgaatcactctgccaaggatcgacctcgtcgccgacggcgaacggggtgttgcggcccgcatcacttcgccaggtcctggcctcggcgccgacggcaagctgggtggtgcggcccgcaccacttcgccaggaccaggactcggtgccgccagcaagctgggtggttccactggaatcactctgccagggatccacttcggtaccggcggcaagatgggtgtttcgggccgaaacacttcgccaggaaccaacctcggcgccgccagcaagctgggtgattcggcccgaatcactctgccaagaatcgacctcggcgccgacggtgagctgggtgattcggcccgaatcactctgccaaggatcgacctcggcgccgacggtgagctgggtgattcggcccgaatcactctgccaaggatcgacctcgtcgccgacggcgaacggggtgttgcggcccgcatcacttcgccaggtcctggcctcggcgccgccagcaagctgggtgattcggcccgaatcactctgccaagaatcgacctcggcgccgacggtgagctgggtgattcggcccgaatcactctgccaaggatcgacctcgtcgccgacggcgaacggggtgttgcggcccgcatcacttcgccaggtcctggcctcggcgccgccagcaagctgggtgattcggcccgaatcactctgccaagaatcgacctcggcgccgacggtgagctgggtgattcggcccgaatcactctgccaagaatcgacctcggcgccgacggtgagctgggtgattcggcccgaatcactctgccaagaatcgacctcggcgccgacggtgagctgggtgattcggcccgaatcactctgccaaggatcgacctcgtcgccgacggcgaacggggtgttgcggcccgcatcacttcgccaggtcctggcctcggcgccgagggctatcaacttctcccactcaagaggaaccgaaagatgtgtgactcgatcttgtatgcccccatggacgagctcgaattcgagcggctgctagggctggcaaccctattcaacgacaacgatgaatggcctatcgactttacggagctgcaggaactgagcgagctgctcggcaaactcaaaagttgcgtcgacgtagcgatagacaacgcccctgaggcggccaagagctgaaggaggccaacctccatgagccgcaggcgggatgatgatgaacccgcactgccagcggaaataccccagcggcgaaccatgtatttcctactgcgcgctcctaccacgatcagcacgatgtggccgaaccccttccctatataggaacactgcaccatggctgaaacccatcggcttcagatcggctctctccgcagcgatgtcaaactgacgcttcacacctatcacgccgcccgcatctggacaggccggcagaagtcggatgccaagcacagcatcctcggcctctccggcttctgtgcatacgtgaatcgcatgcaccgcggggcagcacaggacgatccgtactccgactggtggctggttcagatcgaagagaaagtcgagagctgccaagccgcgctcaaggccatcgaccagcgcctggatgacgtaatggccaagctgccagcgaccctcgatatctccgagaacttgtccgtcacaccggtcaaggtcccgttgttcatctccaaccctctcggcttcaaggcggtctatctcctgaccaactacgacgaactcgcccgccgaatcctgctggcccagcacgtcggactggtcggtcgccgcgacatggaggtctggctcgacgaaggtgcgtcggtgctgcgcagcctctttggtctggctcagagctaccagttcacgggcgccactcgcgacgacttcgccgcgaacaacgctcgcgccgaagccgcgcggaagatgtacgagaagttcggcgagatcccgcaggacatcctggagggtacccgacgctcgaacttcgctccgccgatcactcggggccgctctgacggtgatgccgatgatgacgctgaccgtgtcgagctcgaggactgatcggaatgcggcagctcgataaggaccagcaaggcgctctgcaacaaagtgccttccgcccactgcaacaaactgccttccaggcgctgcaacacagtgcctcactaaaaggccttttaaagccttttaaaggtaagggggagctggcccagttggcggagcaatgcgaagtcctggagcagggattgcttgagcttgcccagggactgctggcccaggttcgtcgcccgcccttcactcttctgcccacccgactcatcgagcagcgcacatccgcacgcaccacctttcttcgctggcagcacattgcaacccggcggatgggcgtcggggtgtgggcggaaatgctgcgccaggacaagaccccggaatacctgctgcaagacctctacgagatggagctgcagcgcatcaccctcaacatgcagatcagcctgatccactccatcggcaagcaggccgccgagtgtgcggaaaagatgggccaggccgaggccgagttcatgggccgactgcagcagagtcagacccgccctggttccgtgggcatgtagctgtaccgctctaccttcgacgaaacgatcaccaacggagagacaacatgagcaacatcagcagcaagaccgtttccaacaccaaagcccagccctccaccgaggtcagcgtcgagatcatcggcggcaagcccaccacgaccagcctcgacgtcgccaagcattttcggaagaggcacgacaacgtgttacgggatatcaaaaacttggaatgtcccgaggattttgcactcctcaattttgaggagtgttcccgcacgggagcgaacaacaggccagagccatacgtgcgcatgactcgcgacggcttcacccttctctgcatggggttcactggcaaggaagctatgcactggaaggtcgcttacatcaacgccttcaacaagatggaacaggcgatcatcgagcaacccgagatcctcagccacaaccacctgctccagttcgctatcaagaccctcgacctgatgcgcgaccacaccctcggcgagccggcccgacccaggacagaacaggtcgtatgcaactacctggccgtcgagtccttggacgcggcgaatcccgagcagatcaagcaggccctgaacttcctccaggggcagatcatcggtgaaggtgtggccgccaagtccttgcccagcgtggccggctcctccatcgccaaggacctgctctacggcttgctgcgctccgctcatgacgcggagctgctgttcaactccctttacgacagcggcgtcgaaaagctggccagcgaagtgttcaaggagcacatggccaacaccttggctgcaacgtctcggcaaacccgtgaactgctcgggtacgtggccagccgcgccactcgctcccccttcaaaccacgctccacccactaacccccgactcaaccgactggagattcatcatggctacccccgtcttctgggaaggcaacatcggctcggcgccggagcaccgcagcttccccaacggcaacaatcccccgcggcagttgctgcgtctcaacgtgatgttcgacaactcgattcccgatggccagggtggctacaaggatcgcggcggcttctggtgcagcgtcgagtggtggcatcaggatgcccagcgtttcgccgaactgttcgcgaaaggtatgcgcgtcaaggtcgaaggccgggcgatcatggaccgctggccggacaaagagtctggcgaagaagtacaggcgctgaaggtcgaagcctcgcgcatttccatccttccgcatcgcctggccgaggtcaccctgttgccgtcgaccaatggccaggcgacccagcatcagcagactcggcaagtctcgcagcaggactacgacagcgccttcgacgacgacatccccatgtagcaggcggcttaatttttgtccgcccattcgtgaagctgcgggtggcaagcactactcgtcgccgcccgcagcctctacaaagactcgcccgacaggaaatccaccatgaacaggaaagatgaccaagcaggttcacattgcccatttcgggatcgcgatgagccgttgaccaggcagcccctcagcgccggcgagatttcagttctggagtgcatggcgcttatggaggaagaagatcgcgcggccttcatccgaatggctcagggcattgccgaagcgacggtgaaacgccggtcttaattttccgcgcccactcgtgaagttgcaggtggctagaaccattcttcgccgcccgcagcctcgacaagcatgccagcgactggagcaaccgcaatgaacagctttgccggcaaaatgctgttaaaccagcatccttaattttggccgcccgttcgcgaagtctctggtggcaagaacttccgattcggaaatctcgaccagtacgaggtgcagtgtgtcaaagaaagcgacccataccgacaagctggacaggcgacattacaacgatccccaccggactgtacgggctcttggcgctgaggccgcgcggaaagggctacgggtgttcgactgcccttacagtcatcctgcgatgcgggcgtcctggttgaaagggtttgcccaggagcagcaacaacagctcgacttctgatcgatcccgctctacagcacctcccgaaaactgcaacaacgcaccgttcatttctcattgttggcccgctctctgaccgcgacagttcgaccgactgttccgagagattccgccgatgcacctcgtaatcattgaagccccgggcaagctgaaaaagctgcggtcccttctcccctccattcgtcccgacgtgacctggcaggtcgaagcgactgccggtcatatcagagacctacccgttcacggccaggatccgcagatgctcaccgtcggcgtaggccaggatttcaaaccccactaccagatcctttcgggcaaggaaaagaccgtcgcacggctgaaggagctgcggcagaaagccgtggaagtctacgtcgcatccgacccggatcgggaaggcgaaagcatcggctggcacatcctccaggctgccgggatcaagaactacaagcgcgttgccttcaaggaaatcaccaagtcgtgcatcagcgccgagctcagctcaccacgccgtctggacctcccgaaggtcgcctcgcaggaatgccgtcgcgtcatcgatcgcctggtggggtatctggtcacgccagagctgcggcgtgtgatgggtaggccaaccaccgccgggcgcgtgcagtccgtcgccgtgtacctggtggtcctgcgagagcgggagattcgcgccttcacagcaatcaagcatttcggggtggaactggccttcgtttcgcccagcgacggccgtacctggaaggcggagtgggatccagtgcccacgtttgccagcaaggagttcccgtatgtccaggatcgtcaactcgcagaactggtgggggctatacgcaatgtgatcgtcgagacctgcattgatggcgaagaaaccgatacgcctccggcgccgttcatctcctcttcgctccagatggccgccgggaatgcgctgaagtggtcacccgacaagacgatgaagatcgcccagcggctgtatgaacaggggctcatcacctaccaccggacggacaaccccaatatttcgaaggactccatgtcggatatccgtgctgtcgccaaggcattggggctgaagtgtgttgagcaacagcggatgttcaaggctgaccaggacgcccaagagggccaccccgccatcacccccaccgattggacggccgctaccgctggtgaaactgctgatgagcaggccctgtaccagctcattcgagttcgtgcgcttgccagccagatcgaagctgccgtgtacgcagtgagaaccatcaccctcctgggcgtcggccccgacaagaagccgctgcgcttcggcgccaaagggaagctgttgaacgtgcctggctggagaaaactgctgcaaggcgatgacgccgaggagcagaagaacgaaacgccctcaaaccccatcccggagctggagccaggccagatcctcaaggtctacagcggcgaggtcctggagaagaaaacctcccctcccaagcgcttcaccgatgccagcctggtgggcgagatgaagcgccgcgggattggccggccatcctcctacgcctcgatcgtgaagaacatcatcgacaagggccaggtgcagatgaagggccgaagcctgatccccggcgagctgggcgaggccaccatcgcgctcctggagcacaacttcagcttcctcagcctcgactttacccgcaacctggaggtcgccctggaccggatcgctaacagcgaggacacctacatgaacgtggtccagcagttctaccagctcctgcagtcggagctgcagacgctgcgcgcgcaccccagcgcacagggcgacccgcgagcaagctctaccgccagcgctcccacggcgccggccagtgacttcctctgcggcaagtgcggtctgcccctggtccaccgcaagaaagctggcaagggcggcttcgacttctggggctgcagcggctatcgcaccaccggctgcaaagtcggctatcccaccaggaacggccaacctgacttcgacaacccgcgcgggctataggtagtattcgcggcgccacggatactccggaaaaagagcaggcaacatgtgttgcctgtgtcgttttcaggcaatttctctagcttccactcatggccgccgtccgtcaggtttctcacctcggtaaaatgaaagctatctaatctcaccgaaacctgtatggtggtctctactgcgtgcccagtttagcgtcccgccttgatgttcagtctgttcgatcctcatctcctcggtttgtcttctctctgcattcagctctagccaggctttgaacctgcgcactctcaaattttggagatatacatcatggcaactcgccaaactggtactgttaagtggtttaacgaagttaaaggtttcggtttcatcaccccggaaagcggcgcagatgtttttgttcacttccgacagatcgaagctagcggttacaagtcccttgacgaagggcagcgtgtaagcttcttcgttaccgcaggcgccaaaggcccgcaggccgaacaagtgcaagctctgtagggctgttagcaccaattaataagtcccgcatatgcgggacttataatttctacctcagagctgtgcagttatcacagctagttcacatgcccgtcaccatcttcctcaccaaccccgcctcataagaaagagaaatactttcaaaccgggctgagcattttcggtcgatacgcaacacaccggccggccacagtgctactcgcttacacaggagcaagcgcttgccaccactcgataacgcctcccctaccgagcagttgccggatccatccctagcccgttacagcgagcggcagctcgccgttgccaatacctgggcaacgcatttctccctcgcagggacagctcgaaccaagttcatccgtcactacctgcgcagcacctctacgaccaggtgctggtgcatcaccgtcgctgctgacaacggtgtgcgttacaccatcatgcgtgcagggccactgctccaggtgttcgacggtcaactgatcggtgcgtgggagtgcaggcctgcccatcgtgtcccagcaagcgcaccctccccagccggagcgttgaagctgctgcagcgcctccagaagttcgacgatgccgttcctgtactcagctcttacacccagcgggcgcatgggttggcgactcagttggcccgggaggacctcggctcattccccaagagtcagtatccatcagtcagccacaatcgctactactcgccgaggcgccagttctacctgaagcagatcggagcggtcttgcgaaccttcaggcagttcctggaccaagacctgctgttcgctatccgctcggttcggtgcctctcgccccagctctacaactggctggctcaaggcaaccaggcgcgccggctgcagatgctgaaggctcagccggtcttgacgccgctactggtggattgcgaggagggagtctggcctcacacgacgaccaacgacaacggcgagagcatctgccatttccttccttgccctttttccctgcttgtcagtgaacgaccgcaggccgccgccgtgccatgcgacttgtacctcgatatgggccgtattcttgggcaggtcgcggacgaagggatttcggtcatcaactttttcgcctggctatttcaggcgccacgggcctcgattcgatttcttagtcacgtcagtcccggccgtgcgggaggagctctcttccatcgcaaacgggaaggccgatattcgggatggcatactctccttatggcagcatcgctaggtaaccggcgtccgatcactcgcgctcaatggacagccttctatgccgcctacaatgcgatcccctggcagattcacaacgccaagcctgactacaaccggctcttcaacggctgccccttggattggcaggatccggcatggcttgcaatcactgcacgcctgagagacatcaaggagttctataccgccctcgaccaggggaactcacaggttgttcggcaggcgcgcagcgccctgaaggcgtatctgggtcattgtacctaccgacaggctggcaacctggtggacgactaccaccaggtccagagggaactgcgcgccacagtacagagcagcctgcccgatctggtcgacaccgacgagtacaccacctgggagggaatgctgcctgtcagccttatcgattgccccaatggcctgcagattgtcgagctccgctgccctgccgatctctatgccgaacatatcgcgctggcccattgcatcgatagctacgaccaggccgcctatcgaggagactgccgactgctctcagtacgtgaggctggccgtccactggcctctgccgaactggagctcaggcgtgagcatggcgagccactaggtaggccctggaatccccagcacctttctacggtgcaactgcgcaaactcgataatgaccccgtaccggcagactcccctgccggccaggcttaccgctggttcatggaacggattcgctctggagccatagcgacgaacctgaactggcccgacatgaccgtccacatgacacgcttcgccgatggtcgctggaaggcgggcctcgccgaagccacggcgaagtggctgctcactcggttggaaaaccgatgagccgtccacgcctggtcaaccgtacctccgcgactccttcgacgcttctgcagcgggctatcttcgacggctacgacttcggcttgaagatcccctacatcgcaggcagcaaccgcgcgctgctggaactgtccggcttcttcatcagcgcccgggagcatccgttgcaccgctactggcgggtccccaagggcaagttgctgcccgaactggactcgctgtacaaccgactcgccgagctcgctggaggcctccactcacagtcctggcgggacttcagcggcatggtcgaatctgcacaggcctcgcttgaccgacaggccttcacctggggtttgctgctgcgcatcgcgccgctggccgagggcggcgtcttgctgtcaggcgagttccatcccggtgtggtggcggtggctcggcggatgcgcggggtgttcctgcgcccatcgagctcctggcgcatcgacgccacacctgagctgctccgcagcaacctgatcctggagcttggcctcgccgaggaacaattcgagatactggataccgtccaggagctgctcagcgacggtagcttcgcgccggcgaccgagctgcccagcatgagcatcggcggtccacagcaggaaccggcagcgccatccctggaggacgagtcagcttgtgacatctacctcgccgcggtgccagagatcgagcgcaccgagtacagctcggctgatatcgaggcggcgcttcagggctactcgctactggcccaccagcctgccggcatcgctcacttgctgcagagaaccagcgccctgttggccgacgacatgggattgggcaagacccgccaggcggtcatcgccgcttcgatccgagcggcgggcaggccaattctggtcatcaccctggccaccctgttgatcaattggcagcgcgaaatccaggaggtctatccctcggccaccgtggccatccagcaggacaacccagaggcgcagtggatcctggtcaactacgagcagttgagccccttcgtcgccaacgcttcgcgcttcgccgtgatggtcatcgacgaggcgcagcggatgaaggaaccgacggcgcaatgcacgcggcacggtttcgacattgccgcccaagtgccgaaccgctacctgcttaccggcacgccggtgctcaaccgtgaaaccgagctgcacaccctgcttcgcctctcaggccaccccatcggacaactgccgctgaaagagttctgcgaccgcttcgccggcaacccggagttccgccagagtctgcgggcggagctgggtgactggatgctgcgcaggcgcaaggatgtgctgcccagcctcaagggcaagcagcggcagttgctgaaggtggccctctccaccgaggaacggcagcagtacgacgtgctgcgcctcgaggaccgaccgattttcgcgcgactcggcgcgctgcggcgttacctggaaacggtgaaggttcgcgtggcgatggacctgctgagcgagctcgacgccgaggacaaggtgatcctgttctgcgagttcaagccgaccgtggctgcgctgaaggaactctgcgagcaggccgggctcggctgcgtcacgctggtgggcaatgactcgcttaccaagcggcagaaggcgatcgatcgcttccagcaggattccgactgccgggtgttcatctgcaccacggcggccgccgggacgggcaacaacctcactgcggcgaactacgtgtttttcctcggtctgccctggactcccggtcagcaggaacaagccgaggaccgcgcgtaccgcaacggccagctccgcatggtcgtggtgaagatcccactggtcgaggccacgatcgacgagcaactgtggcaactgctcaacgcgaaacgccaggttgcccaggacctcatcgagcccgagcaggtcgacggaaaccgtgcgcttttggccgcaagccttgccgaacgctgattactcgggttgaaccagccgctgatcgacacagtaaaaaaactactctcaccaaccgagcacttcctgctgcaacacggaggagcaggaagcaagctcgatcacaacgacacgactgttcagcaggagatgccccaaaaatgagattcgagcagccctcaccgactatcgactacagaagaaatatggtgctgcaagcgttgctgaagatcgaggcgctctacgagctcgcacatgccgcctctccagagctgctagcgaacattaaggaagcgctggccgacccagatagactttgcgaaatggcgacagcaatcgccttatattaccttcaccgggaacctacagttccagcgctatacatagaactcgtcgaggatgaagttgcacgctaccccttcacctatgacgagatagagtcagtgatggattcaaagattagggaagtcctattccctaggtatgagcgataccacgatacatgagtgagcccagcaactcgattcaccagtaatagccaaggatcgggagagggaactctaactggacgagttctcactgagcatgcgggcgggcggtcagatcaactcccagagctcgcattactgccagcatggttttcaatgtagggttcccgcgctcactaaacgatttgtaaagctgctccctggccaaacccgtttccttggccaactccgtcatccccttggcgcgggccacgactcccatagccttagcgatataggcggtgtctccagtatccaaagcgtctgcgatgaacagagccatggcctccgggctgtccagcgcttgcgcggggtcataatcataaatttgctcggtcattgcggcctccactcatttgccaggcgtttcgccatttctatatccctggcctggctgctcttgtctccaccacatagcaggatgacgatttccgtcccgcgctgctggaagtacacccgatagcctgggccatagtgaatcctcaactcgctcacaccctggccgactggtgacacatcgccgggtagtccattcgccaatcggaagatacgggcggcgatcacggcctttgcccgccgatcctttagcttgctttcccatgccatgaaagtggcggtttgtttgacttcgaccatgggtcaactgtgacttataaatcacaaacagtcaatcgcacgcagccttagcacacgctttgttccaaattctgttggctccccttgaagcacaatcctgcgggtgggcaaaagaaatcccctaccctgttgccgagtatttcctgctgaggcatggcgaatggcctgccactgtgtgccccatcatcaaagggggcctcaatgaccaggcagttgaccactctcacgctgtgcctgctgctcgccagttgcacgacccacaaggctgagccggccaggcccgccttcgacagcagccgcaatccagacctgctctctccggacctgtacccgaatggcgtacaaccggagaaggagcccgtcgtgcgctacgggcgctacaccctggtcagcacccagcctgatgccggtcaacgcgacctgatggcccagatcatcgacgtaaccatcccgtcgagcatgaacccgagtgtcaaggacgccatgcagtacgtgatgagccgctcgggttactcgctgtgcccggcagaggccggtcatgtgaacatcctctacacccggccgctgccggcggctcagtacaagctcggcccgatgaccctgcgcaacaccctccaggtcctctccggccctgcctggcaggtgaaggtcgacgaggtcgcgcggcaggtctgcttcgtgctgcgcccgggctatcaacttcccccggtgccaaggccgaaaccggtccagcaactgtatgcgaagcccgctgccccaactccagcggcggtaacgcaaccctcctccacggaaaaagtcagcacgctggagtcgcccgtcgtggtcgcctcggtgccaacgccggcgccgatcacaaccagccccgctccgaccaagaagcctgaatacaccactgtgctccccccagccgcaccggccaaggatggccactcctcttctcctcccgcggcttcggcaccgatcaagcttccggcctccgccgtgaagtccacgccgcccactccggccaccgtggcttccactccaccggacaaggcgctcccttcggcggagccgagtcggccgctgacacaggcctggtcggccgagacgggatcaaccctgcgcgacaccttggaagcctgggccaagcgcgcacgctggaccgtccgctgggagccgcaggatctcaactatccgatcgaagctcctctgaccttccacggctccttcgaggacgcggtatccgagctgttcccgctgtatgacgctgccgaacggcccttcctggtgaacgccagccggccgcagtccctgatcatcatcaaggagcgcaagaactgatgcgtgcccccctgaagaacctcttgccttgcctcctgatccccgcgctggccagttgctcggtcgcacgggtgaacgagtcggcggatcgtgtcgaagctacggcagattccgcgtcgacgatcgcagcacagatgcgcaacacccgaccggatcgccgcgatacggtggtgttctccgacaaaccctgggtcagcacgaagcccctgagcgtttcgcacaccttgtccagtgactgcatcgtgacgtggcgccctgcaggcgcagcgtcgctgcaggaggccgcccaggaagtcatcaaccaatgccacctggcggtcagtatcacgcccgacgcgctgaacccggccgcttttgccctgcaacctcagcagcgcgcgagcaacgccccgccgcccatccaaggcggccaggacatggccaccatgctgtttcctgcctccgtcgccaacggcatgtccctaggtgccggcggcagcatgggatcgagcttcgggtcctacggcccgcggtcgctgtacaacatcaaatggaacggcaaggtcagcgggttcctcgatctcatcgccgcccgcgccggcgtgtcctggcgctacaacccaaccgagaaacgggtcgagttctactacctggacactcggaccttccgcatctacgccttcgacgacgtcaacacggtggactccaccgtgcgttccggtatgacgacggccgccggcatcagcggggatggctccggatccactggacagaatggcagctccggcatcagcggcgactccggcagcaagcagaccaccagctccgagctgaagacctcgatcctcagcgacatagagaacagcatcaactcgatgctgacgccgagcatgggacgcatgtcgctgtcgcgtgccacgggcaccctgaccgtcaccgaccgaccagaggtcctcaaccgcgtccagcagttggtcaaccgggagaacgagagcatcaccaagcaggtgctgctgaacgtcaacgtgctctcggtcgccctgaccgacaaggatcaactggggatcgactggaacctggtctacaagtcgctcaacaacaagtggggcatcggcctgaagaacaccatgccaggcatcgatcaaagcgcgatctccggctccgtgagcatcctggataccgccaacagtgcctgggcaggatccaaggccatggtccaggcgctggcccagcagggtcgcgtctcgaccgtccgctccccgtccgtgaccacgctcaacctccagtcggcgccgatccagatcggccgctacgacagctacctggcctccagccagatctccaacgtcgcccaggtcggcagtaccacctcgctgatcccgggcgccgtgaccagcggctacaacatgagcctgctgccgttcgtgatggaaagcggcgagatgctgctgaagatcaacatcaacatgacctccagaccgacgttcgaaatgcagaccagcggggactccaaagcccagttcccgagctacgacatacaactgttcgaccagaaggtacgcctgcgcagcggcgagaccttggtgctctccggcttcgaccagaccaccgaggataccaacaaggtcggcaccggcgacgccggattcttcggccttggcggcgggctgacccgcaataccaaacgcgaggtcatcgtggtgctgatcacccccgtcgtgctgggctgaaccatggagaagcctgacatcggtagccgtggaccagacgtctcgatcctgagctaccacggcaacaagttcgtcagcggcctgttctggcggccgctatccagccagcggcagtacatgaaggaagcgcgcaagctgggcaaggaagagcatctggacatcgttgccatccgccattcgccgacagtgatccaggccggcttcgtttcgaagtcgcaaggcgcagtcaagggcatgtactccctggcctcggcgctttcaggccagttcgaaggcgacttcctggcctgctggaaggtcgacgaggaccgctacgcactggtcgccacgctcgatggtgcgatcgtccccggccaggacctggtcactaccttcgacgaagccagggaccggatcaggaagctctctacgcgcggcgtgcttcgaaacgcacaggtcttcgttcccgaaggattcgatttccccgtcaaggacttcgacatcgaggaactgctcgcgccgaagcgcctgcggcgcgactaccgcctccggcaactcaccttcggcttgtccgccagagagtggacggcagtggccctgctcggttgcttggtaggcgggtcgctaaccgcctactacctatggaatgcccaccagcaagagctcgccagacaagccgcgctcctcgaggagcagaggcgcctcgccgagctggccgagaagaacgcccaggccaagcagccgctggacctggcttcattgcagaagccttggacgctcatgcctgacctcgaggacatgctacgcgcctgtagcaaggcaacgggggtactgtcgctgtcgatccagggctggctcttcgaatccagcaagtgcgacggcagggtcctggtcgccacctaccaccgtaccggcaacagcacggcagccgacctgacagcggccagccagcacctgttcgctgaccgccccgccttcgtcatcgacaacggcaacaccgcggccctgaaggtcgacctgaaagtcgccatcggtagcgatgagccgctgcagccagccgacgacgcgctgcaggcgctcaccagccatctgtaccgtcagggtgtcgagcccaagctgtcgatcagccaggagacaactccgccccttcctggcgcggaagcggcgacggagcagcaagtggtgttgccctcctggaagaaattcaccttcagcgcccagaccaggctcccggcagacctgaccttccaggggctgcccgccgccggggtccgcatcaccaacctcgaaaccacgctcaaggacagccagttggactggactgtcacaggagaaatctatgcgaactgagccgatcggcatggccgtggccgtgctcttcctcctcgcgtccggccaggcctgcgccggcaccgttggcgaactggcggagatccaggcccaggccatcctcaccgaggccaaggtgcgtctggccacggcgcagcggcaactggagggcaaaggcgaaaccggccaggtcgtcagcgcccaggggcagacgttcgccatgccggtgccggcggcggcgccgacgatcacgcagccggttccgccagtggtgcggaccatctacggcgccggcggcaagatgactgccacattcttgttcccgggcgggtacgaggtggacgccgccagcggcgcggagctgccgggcaactaccgcgtcgagtcgatttccctggaccaggtcgtactcaccgacaaggacggcaaccgcgtgcccgtgggcttctccagcgttgccccgacccaagccgcctcctcggcccaaggcgcctccgttccgccggcgctgcccggggcggtaccgcagccgttcatccagtaggtaccgccatgacgaaccttcaaattgccgcgcttgtacagccctccatggtgacccaactgctcaccgccgacggtggcgagtgggaggtctcgaagcacctgcaagagatcatggccctggccgccgacggcacgctctatctatcggagagccaccagaacgacattcacgttctgtcgttcatcgaccgtctcgatcgccgtggcttccgataccagctcaacctcaccgacctgcagaccattcaccagctctaccgcgccgtcgccatggacggcctggtcgatagcgatggccagcgcgccacccagatgcaggagcgcgtggtcaagatcattcgtaaggccacagagctgcgcgccagtgacgtgcatttcgtcgtgagtcccgccggcaccggcagcaagatccgtttccgcgtcgacggcctgctgaagaccgtcgagcagtaccgcagccaggaactgcacgaactttgcgcaaccatctaccagtccatgtgcgacgtggccgagccgcttttcaagccgcaattggaccaggacgcgcggatgagccaggccttcgtcgagaagctgaacctgttcggcgcccggatcgcgacccgcccgcgcgccggtgggttcctgatgatcctgcggctgctctacgacgataccggcctcgacagcctggagcagctcggctacctgcccgagcagaacgcgctgttcgatcgcatgatgcgcatgccttacggcatcaacatcctgtccggccccaccgggtcagggaagtcgatgaccttgaaggtcaccatggaaggactcgataagctgcatggcggatccaagcatatcctgaccatcgaggatccaccggaataccgcattcgcggcgaaggcatcaaccagaccccactggtctatgacgccactgacccagacgcagaacgccaggcctgggccgcaggcatcgccaacggcatgcgcctggatccggactacatgatgatcggcgaagtgcgcgacctcttcgccgctgtcgccgccttccgtggcgcgatgaccgggcacggcctgtggtcgaccctgcacaccaatagcgcgatcggcattgtccagcgcctgaaggacctgggcgtcgaccccggcttgctgttcgatccggccctgctgaccggcctgatcaaccagagcctgctgcctaagctctgcccccactgcaaagtgcgcttccaagaccaccaagaccagctcgcgctcgacctggtcgaacgggtccagcgcttgaccgatgtttcccaggtgtacgtcaaggggcctggctgccaggcctgccgtggctccggggtcaacggccgctcgatcgtcgccgaggtggtgctgcccaccctcgccttcatgcgtgtgttcgccaaaggcggcccagccgaggcacgcaactactgggtcaagaccatgcagggcatcaccaagcacgcccacgccatccgccgcatcaacgagggtatgttcgacccgcagatggtcgaggatttcattgggccactcgacttcgatgagcatctgctcgacgacagcttctactcgcaggaggcgtgctgatggggggcttctgggagcagttgcagttcgccttctacagcaagcagttcggccgcaaggaacgcctgcagttctacgaaagcatgtccaccctgctcgaaaacggggtcccgctgaaggacgctgtggcagaggtacacaagatcttcgctcatgagggacagcatccgtttcatccggtggccatcgccagtcgcgaagcgctgatggggctgtccaacggcaagcgtctggccaccgccatggcgctctatctacccgcccaggagcgagcgctgatcgaggccggcgagatgagcggcaacctggttcaggccatgggcgatgccatctccctggtcgaggcccaggccaggatccgcgccaccatctggcaggcgctgctctatccctcggcgctgtccgccatgatggtgttcctgctgtgcatcgtggcctatcgcatggtccccagcctggccaggctctccgacccagtcacgtggaccggcccgctcgccacgctcaacgccattgccagcttcgtcacaggacctggtatctacgttctggtcgccgtaatcaccctcacggtggtggtcatcgtcacattgccgacctaccgctggaaaggccgggtctggctggaccggatgctgccgccctggtccatctaccgcatgctccagggcaccaccttcctgctgaacatggcggtcatgctcaacgccggcatacgcccttacgacagcctggccagcatgatcaagatctccccgccctggctgaagcagcgcttggaagctgcccgctacggcgtgggcctgggccagaacctgggagtcgcccttcgcagcgccggtcacgatttccccgaccgacaggccatccagtacctgtgcatcctcgccaaccggggaggcttctccgaagcgctggtcaagttcagccgccgctggcaggagaccagcctcaagcagatcgagctggccgccgggctggtgaagaacttcgccctgatcttcatcggcgcgctgatgatcctggtcctgctcggcgcctaccaggcacagcagctcatccaatccatgaaccactgaaacctcaccaaggagcgctccatgagcactacgcaacgcacttcccgtccgacgcagggcggtttcgtttccatcgagatgatcatcgtgctgatcatcatcgccatcggagtcggcctggggctggccgcagcggcagggatgttcagttcgtccaacgccaacgaggaacagcgcaacatcagcgtcattgcggccaacgcacgcgccctgaagacctcttcgggctacggctccagcagtaccaacctgatcccgagcctgatcgcaatcaacggcgtgccgaagaacatgagtgtctcctccggcgtcgtctacaacgtctacggcggatcggtcactgtctcgtccaccggcatgggcttctcgatcaccaccagcaagttgccccaggacgcctgtatcacgctggccaccaagatcgcgaagaacacattcgagcagaccaagatcaacagcggatccgcgatcactggtgaagtgaccaccgcagcggcgacccaggcctgcagcagcgacagcaacagcattacctggacctacagttcgtgagtgtgaacccgatcatccaggctcagttcgtcgacctttacctcggtgaaggcttcgccgacgtgaagggcctcgccggcgccgacgcgcgccgggtcgaggtgcccggcgagtgggttccccacgctcaggagctccttcagctctgcaggaagacgatggaggagctgcaggatcccgagttcgccatcgtcgtcgacggtgtgctactacgcgtcacccaactggaagatgctttcaacggcgggagtgtcttcgtgctgcgccggtcgacagcccaagttcgaagcttcgaggatatcggctatccgagcgaggtggtcgctacgctcctgaacccgcaactgcagggcttgatcctgttctgtggcgatatggcgaccggcaagaccagctccgccgcctcgctgattctcgctcgactgcagaccctgggtggggttggcttcacagtcgaggatccacaagaaaccaacctcagcgggcaacatggactcggccgctgtatccaggttaggacctcgcgacgcttgggaggctacagcgaagccctgttgcgcacgctgcgtaccggagccgacctgatattgatcggcgagatccgcgacgaagacaccgcctaccaggcctgcaaagcttcgctgaacggcaacctagtcatatcgaccatccacgccaagaactgcccgcaagccatcgaacggcttatcaccctggccaaacccctcgcgtccaatgcctacgacgtcgtggctgaaggcattcaggccgtgatctgccaggaactggtaagcgatggcgcagctcgacgactgcatgcggaaccgttgctattcaccggggtggactccgtcgccatgcgcgacaagattcgccggcagcagattcacctgcttgaggacgacgtgagtcgccaggctcgcagaagcctgtgggagccaacctatgaataacaccaagctcaaccgcggctttatctcgattgaattaatgatcgccctgatcgtcatcgccatcgcgactaccggcgggatttcagtcttaatgagctatctagacggcctgaatgaacagcacgcggcccagcagcaacagcaggtggccaaggcagcggagaagtacctgaaggacaacttcagcacggttctggccagcgccggcgccacggccccggcggtgatcaccgtcccgatgctgcgcaacacccgttacctgcccgcaggcttccgcgacaccaacatctacggccagcaataccaggtcctggcccgcaagccggcgaccaaccagctcgaaacgctgatcgtgacctcgggtgggcaggcggcttccgaactctcgatccgccggattgcgcagctcatgggagccaccgggggctacatctcgaaaaccaacactagtatcgcccagggcgccgcctggcaggtggccttgagcaatttcggtagcgctcccggtgctggacacctggcgacggcgctgttcttccaggacggtgccattgccaacgagtacctctaccgcaatgccgtcccgggtcatcccgagctcaaccggatgaacacggcattgaatatgggcggcaacaatatcgccgcagccggagcgatcaccgccagcggaaacatcacgaccagtgcggacatcagcgcgcgcaacgtgacagccactggcacggtgaaagccggcactgctgacgtcgccggcgagacatacaccggaggctggttcaggacccgcggtaactcaggttggtacaacgaacggtgggacggtggctggtatatgagtgacagcacatgggtcaggtcgtggatgaacaagagcgtttataccggcggagaattgagagggggaaagctcagctccgaaggtagaacgaccgtcggcgagtaccttcagatcaatggtttggcggcagaaaatgcaggatgctcccccaatggcctggtaggcagagacaacagcggccccctattctgcaccgatgggctgtggaaacggcccagtggcgtgaatatcgccacccctgtggtgctggcacagtatcccgccgataaccgaccccgcacccactgccaagcggtatccagggacgcgctgatcaatggctccggccccggcgttctgcgcctggaagtcgatggcgtgatcgttggtcaagcgcgctccaccgctgggcgaaacgctgatgtagttgaagacgcctcgatctccgccatggtgaaagccggacaccagttctgcctatacagcaccgttgtgctcgcaggattcggcaactccgccggcatgcgtgtgacagccacctacctcaactagggagtcgtccagatatcatgccgctgctctggattgccctattgctcgccctgctcaccggaacctggctgagtgtacaaagcgaccacgcgacctcgagcgccgaactggccgaggtcgacaccctggccaggagcttgctgctctaccgctccagcctggcggagtacgcacacgccaaccccggtttcagcggctcgccggcggactccgctcttggtttaccggcctggttccgcaagccagcgcggcttcagggctacatcgccgccggcaccagctacgctttcatcgcctcgccgccggcggggctggcggcggccgtggatgctggtacggaatccgacctggttggcgtcaggcgcaacggccagttagtcacgcgccgcctcggtgccactgccattgcgctccctgctcccatccccgagggcgcggtggtcgcggtcaaataacctccacaggccagtaaaccccggcgctgcttgataaaccggcctcctgaacacataatgccatcaactttgatttcaccccgctggctactgacggtcatcagtagcaccctggtgatgcaggttcgcctcatcgccaaaccgtaagcacgctacaacaccgggtggggcgtgcggatctggttgagaattctccctgtgtctccctgttcttttgcttgtcatgcagccgtcaactcgtgtcgagcgagtttaaaggcacatagggttctcaagaggttcggtgtttcctcgatttaagggtcgtactggtgttacggcccctccttttcccctctccatgggtagcctgatgctcctgctccaggaccatcaggctacccatcgggatccttctccctgccggtggcccgccggtgatacgcagggctccctttgtacgcggatgcgtgcctactgtttgctggccaagccacgataatggccgggtgatgggatcgagacgatcaatgcccagggatcgacgattcaaccacaggtggctcacttgactccccttccagacacggctggggaaacctttgacagggtttctaccagccgcgctcttccgccctcgctctccgcccgctgcatcctgcatccgctccccctgcttgaccttgacactttcgccccccgcttcgatgatgagcgcgtgatctgctgacgttgtcagcgacatgcccccatgcagctcggatccgaaatgctgcagcacagcccaccgtgttgatccaacccaagaccgtatagcttctggtagcacggtcggtcggcctcggtcgatagaagctcccttccgcaacccagcggggaatccacttccccgccagggtcagtgttttctccgcaccctcaacctgcaggagaaacaccatgtccaagcaatccaccagcttcgaaatcggctttgccctcggcagtgttgtgcgtgagttccgcagagcgctcagtcgccctccggtcgtagtgcatgcacaagctccggttgcgtcgagcgtccagcgtatcgagcccgccatgcttgctggcccgaccgccaaggagctggaacacatcagcgacgtcccggcgatcgtccggttgaagaaagtcaacctcaatgactggtatctggccaacacgcgcgaagtgcaaaagcccaagcgcgcgcgcaaatccaaaccggccaaggcggcccccaaggccaaaacaccggtcaggaaggagctcaagctgggctcccttgatcaactgatcgcaccggttgatccgctgacctgctgatccgtacctctcaccaccccctgccgggaaaccttcccgcggggacggttttccggcattcatcgaggaaaaccatgaaatcgaagcgtgctgcattcgcagacgatctacgaaaaatcggtaccactgccgttgccgcgagcctggtgggtatattcctcagcgagcaccgcttgctgacggcatatgctttcgtcatgggtatggtaatctggctcataggtatcgctctcaccgaggaggagtgaaatgtcccagaccgagttcggcatgatcatcatgaccagcctggtggttatctgctccggcatagccctctggttcagttggcctcaagtcaagacctggtgccaaaaacatcggattcttccccgtcatcattgaccatgaaagcgcccaacactgggcgcttttttcatttcaagggtattgacattcatttttcccctgcccatcctttaccccgtgagctgctgacgttgtcggcaaccctcccccagtagtcatgatctgaaagactacgacacggacttccgtgtagatcgaacccaagatcgcaccagcttccggtagcgcgatcaatcaaccacaggttgatggaagccctctccctcagatttacctcccaataccgacccatgcggggaatacttttccctgacgggcaaggtgtttctccgctttcgcttacgaaactggagaaccatcatgagcaacaacacccaagcccaagaagccaaatatttcgacctgcacaccaccggtatcggctacctcaatcgcatccgcgaagtaccgatccgccgaggtgaaccgttcctcgccgtaaccgtcgcagccctccatggcgcggcagacagcgtggaatactcctacatcgactgcaaagtggtcggcgcccaggctgaaaagcttgtccgccgttgcaaggaagcagtcgaggccaagaagaaggttctgatttccttccgtatcggcgatatctgggcggatcccttcatccaccagaaaggcgagaaacaaggcaggcccgacgcaagtctcaaaggccggctgctcttcatctcctggatcaaagtagatggcaccaccgtctacgatgcgaaggaagaagctgaaaaagcccagcaaggccaaggcgaaccgcaaggtgaacccgcagcccctgctgaacaagccgctgcttgagcacggcttgattgaataccggccctcatcccgagggcctttcactacctacgctatgcgccactcttcatcgcatacccatccggggggcaccatctcccccagggcgtggtgttctccattatctggagatcatcatgagcaatatccaaatcgtagatctgcccgccctgccggaagtagaggaagtttgcctctctgacatcgaggacgagttgctgctcagcaggcatttctgcaacttcgcctggctgttcctggccagcaacaatgcccaggtatctgccctggcctaaccgccaaacatttcccatttaggggacctcagtccccttgggactggtgtttcctaccgaaaggagaatcaccatgcaatacggaaagctggcactcgcccatcttcgtctcgaactgccgctgcaggttcttatgtccaacgccggcttttatatcggcacccttgatgaagaaggaccagcttcgcgcgaatcggttgaatactaccaatcccgcgaacttgctcaacaggcattagacaacggcacttggtcgcaacgggaatattaaagttttacccgttttgctgtgtgcttctgctaactcaacccagacggggtcatccccctgtcgggtggtgacctctccgatttggttaagaattggaaatcaccatgaacacatatccagaaaggctcccagctctactcaacatcggagtgcatgctgcacaaagcaggttcgagtacatcatgtgcaaaggcttggttgatgagtttggcgatgcaggactcagtatcgagctctatgtaattcaagatgcaatcgaaaccttggcgcaggccgactgcgagcacggttgcgactcgagcacctcatcgatacttcaatactatggcctggtagagcgataccagaaggctcggcgtaaagaagaacacctatcgcgttaactacaacaactcgacatcacctgggcgcttcggcgccccttactcacctggaggtccatagcctccaagggcatgggcttcccggcaaccggagataccccatgactcaactcaatccgtttattcgcggctatgagagtttccgcatcgagcgaaacctgcagatcactgacgaaggcgacaatctaccgtgctaccgcgcactgcatgaaacccagcgacacctcccagacgaatactttaagtgcgagctgtgctacttcaatgacgatttcgccgtggtagcgcaagaactagacaatgaaatagtcgaaaagtgccctcaccaaggaatagtgagaaacgtactttacagcatctacggtgagcaggacggcagaaaaaagcttatcggagatcaatattcactgacccaagccgagagtgtcgttcgatacctttcgttcggcggcggttacaaccgctgctgggagatcagaaaaacacatctgcccatcactacatggaatagcctctacgaaaagttctcgaccaagatgccagtccgcttgccgtcggtgttggtctcgctcttctggtgtaacgagcacggcgccgtgggctttcgcctgcacaacaccccttggacggatgagtgcctggagatcctggagatgacctcagcaactcttcgagagcagcagcttgccttcggcctcgacgaacacctggtcgatctgcttcacctcgcgggacaagcagacattcggttcctggtactcgatccattcgcgcccacgctcaagggcctgccactgtatgacgattgagcaatccggccggcgggacatcccgccagccctcgaattcgaattggctcgctgtcgttgacagcgcctcccaaggagccagggtttaaggctccggcgcgcaagcgcaaacccacccaagaccgccacagcactcggcagcgcggtcgcatcacgcaagtgatggagtgcatcctacccacccacgcggggacctcatccccgcgggagaggcctgcgtattcggagacctctcatgacctctctcaacaaccactccagcgcaggccacactgctgcgtacctcaaactcccgatcgttctcaccaacgcggcctggctgcgcctggtctatctcgcaaaccctgccagggtcgacgagatgggcacccggctggccagtgtcgttcaaaccgcctggcaggagctttcgctccagccgaccgcgaagcacatccaattccacctgtaccacaaagaggaagaggggcaggaccgcgcgctcgcgctgctggtcctctcgatagtcgagccgtccgatgagccttcctacctgcgcatcgagctgcaggaagaaagcctcccgggcaacccggataccgagtagctctcccctcaccacgatcccgctacggcgggatcatccttttcgcaggtcacgccatgatcaacatacccggccagttggccattcgaaccatcaacggtcgcaatggcgagttcaacgtgggaaagctctcgacctcgatcggggagttcgtcatcaaggacgctctcctggaccagcacatcgaaggcaagtaccgcggtgatttcgccatcaccgagatccgtccctcgtactacaccaccggcggccggctggtcgtcgagatccgcgccaagctggacagcatgacgctggacgacgtggacaacctcagcgacgaggaggcagagcgcctctctggcaatgaggtcgatccgctcgacgaagtgcccgcgatccagcaacccactgtcgcaccggcggcaccgccgaagtcgccccagaaaccgaagcctctgcgccccgtcgcaaccggggacgacgcgcctttcggtatggaccctccggctcctgcagagcaggccgcctctctggacacagacgcggatgcagaactgttcgggacggtctggccgctaggcgaaatcgtcaagctggacaccacggtcgaccgcaagcgactacgccaacagtgcgtgcgactcggcgcgctgggctatgagctcgacttcaaacaacaggtgtggacccgcaaggaggccgcatgaaatcgatctacaacaccccaggcttcagcgaggagttgttactggtttgcgcctcgctgcgcgaggtcggactggacaatctggctgaccagttccgcgcggcagtgttcgaccgatccgtcgtcgaccaggccatcatcgcactgcgtgagcgggtgaagaccccttcgccggagcatgcggccgacaacgagccctggttgtactgcgactggcaggccaggcaaacagcttaccggctcctccagcgccttgagcgcgcaacacgctgaagcaacaccctacccacccctgccgggttctcccgtcagggagacctggccaaccacaggagcacacctatgggatggcttttctcacatcagacgaaggaagacctgctgcgtgagctgctggccccaaccagtaccttcgcaggcagcaccgaggtgctggcacacgcagtctccggcaatgaactttggactgtcgtaaaacgaacctttcaccttgccggattctatttcggcaagccggccggtcactcgatcaccatgatcgagttgcacttgctggactgctcggccgggcaatggggctacaagaccattccggagaaagcaggcccgttctactacggctgtccgctggagttcctggacctggctcacgatgagaccaaccaggagtggcgagaccgtctgacgcaagaacaccaagcctgaccgcaccaaccacttcccttgaggggctccctcaagggcgctcctcgtctaccaccaggagcacaccatgaacccactgttcaccaacctcacccaggaaaccctcgcctacctcgaggaccaactgtccaacaacgacgtcgccggcgacgacgagctcatcgacctgttcatcgaggagctgtcgctgaccttggagcaggcggaagcggctgtcgcgctacgcgatcagtacctctgccaggtcttcctgaacggccaagggccgctgcaccaagacgatgggctgagcttcgatcctcacaccaagagcgttcggtaaccaccacgctcccctgcaccagttggactacacccccgaggggcttcaccgcccctcgagggcggcgtggctcctccttccaggaggttcctatgcccagtcccaccccgctctaccagatcgaagagtgcccagacctgtacgtcgacgcctgcgtgtgcgacgagcagcgcaacctggtctttctttcggcctggggccgcgacaccgtgacacaagagttcctggccaggctgacgctgggccgggaagaaaatggcatcgaccatttccacatcatcgtggacggccgccgcttacctgtcttcccaaaccaggatctcctggagaaacgcaccacccgccagttccgcggcacgttgttcgggagcctgctcaacctctggctgttcgatcggcgcgcctcggcacctgaccgaagcaatcacctcgccttcgcactcctgcagcgcgatgaggatccacaccaaaggctctggccgctggtgatggagacctgtccgctccccctcctacaacactggcgcgagccagtgatggaggtcctcacccagcaccagatgttgaacgccctgccagggacgatcggcaacgtctgcgcctggcgactcgccctgcgggtcgacgtgctcgagcccaccctcggtgagctgatccgcgaaagcattcttaccaccgatgctcaggcgcaagcctgagccatccccctctgactcaaggagaccccatggccctcatgttcccgcgcttggcgcgcaactttgcacgcaacggctacttccctaccgatgaggtcaccctcgaacgcgctctgcaggccctcgctcccgccccgtcgggcaggatgaggatctgtgatccctgcgccggtgagggggttgccctggctgaggcagcacactccctcggccgcgaccaggtccaagccctcgctgtcgagtacgaccgcgagcgcgccgaccatgctcgaggcttgcttgaccgagtgctgcacagtgaccttttcgacaccatgatcagcaggcagtcgttcggactgctctggctcaacccgccttatggcgacctggtggcggaccactccggtgcgtcgcagtaccagggcagcggccgtaggcgtctggagaaagcgttctaccagcgctgcctgccattgctgcagtacggcggcgtcatggttctgattgttcctcactacgtcttggacgatgagctgactggctggttgagcaaccacttcaccggcctgcgcatctacgcagccgcggatcctaccttcaaacaggtggtgatcttcggcatccgggtccgtcggcaggacctggcccgggcggacgccaatcaggtgaggtctcgcctgcaagcgatcggcgcgggccaggaaaaggccgaggaaattccagcggcttggccgtgggaaccctatgtggttctgccggccaccagcgagctggagcacttctaccgagtgaccctggagccggagcagttcgccggtgaaatccagcggctgcgaggtctctggcctgacttcaaccttcacttcgcgcaagcggggctgcagccgcgcccaccagtccgcgagctgtctcgctggcacctggccctggccttggccgccggcgcgatatccggcgtcgtgcaatcgaagtcgggccggatcctggtcgtgaagggtgacacctacaaggacaaggtccgcaagaccgaattcaccgaagacgaagacggcaacatcaccgaggtgaggatcctcacagaccgtttcatcccgatcatccgggcatgggaaatgacaccctcctcggtcaatcagggccgcgtgctgaccatcagctcgtcggctgcgaccacggaagaggctgaagagccccaacctgagccggcccccgaaccgctgctgttcagccctggccaagtcgtaatgaccgctgccgtgagccacctggtggaaaccggtcaactcaacccagcgcctttgctgaaccgccatctggcgggagattgggggacgctggaccaggaagactggaacaccaaccagagagccctgaagttcggcgataggctgctgtcgtcctacgacatcgacgccggcggcgaatccaggctctggatcatcactgaggcagaccgcagctcaaccacgcttttgcttcctagcgattactgacctcgccctccgcggcgattccttccactccaccctgcagggtatgccgatacccgaaagggacgtgcatgccctgctttcttccttcacctgcaggagatgcacatgaacgctcagacccaaccggccgccctggccgccttccccctgaacatcaacctgaccgacttcatcgacgagttcggcgacgagctcctggagtcgctcaatcgctccaaccccccggtctataccggctccgacaacgctcaccgccagttggtggttgcagtcaatcagggcgatggcgcggtcagccatgctcatgacacctcacgctgtagcgcaccacgccccaaaccagcaactcatccccttccaggatgtacctgggcgcgtaccgaggatctcggcgcgcagcaccacctggctcccatccttcgccaagcgtttcacggtaggctcgccgttcaccgctgcaatcacgatgtctcctggctcagcttctcgggatcgatccaccaccatgaggtcgccgtcatgaatgccagcgcgaatcatgctgtcgccgccggcgcgtaccaggtacgtgtgaggcgctcgaatctgcagaatctcatcaagcgagatctcccgctccaggtgatcctgcgccggacttgggaagccggccgacaccttgctggaatacaggcgcaaggaagccccagacccagcgactgggccgaggatagtaacgggcatgggatgaaaacctctgtatactgtctgtttatacagtagacgctgacaggatttgcctacaatgcaggtaggccaagatccgacagacggaggcacggtgcgctatgtgcggaagagtagctcagtaccagggcgcgagagagtacgctcaattgatggccgactggccatttctggacctgaccgatggtgaaccactcgaacgctacaacgtagccccttcaacacaggtcgccatccttcgcctggtcggcgaggatctggtagcccagctcgtccgatggggttggcgaccgttctgggcccaggaccgtgccgcaccgatcaatgcccgagccgagaaagtcgcccattcgcgcttctacagcgcagtctggaagcacagggcgatcaccccgatcgacggctggttcgagtgggtggacgagggaggagcaaggaagcagccctacttcattcagcgtgccgatggtgccgccgtcctctgcgcaacgatcggccagttccctgaactggacagacagcaggaagaacgccatggcttcgttatcatcacggctgatgcccagggcggaatggtcgatgtacatgaccggcggcccgtcgttctttctccagagctagcaagggagtgggtcgatggggcaaccccgcccgaacgggcagaacagatggtgttacaggaaggtgaggctccagaagtgttcacctggtatcgcgtcgaccgcgcggtcggcaatgttcgcaaccaaggggcacacctcatagagcctcagcggaccgggtaggcttagttcaactatcggctatcggctgccaggaattgcaggaggaagtatctggcgatgaatcggggcgttatccttcccctgtcgccagcgacgaaggtcctcgctcacccaatcattcagtgaggccgcggacaaggttcccccattcttcaggtaatatgcaacctccgccatagcttggtgatagccccgccggtaagtaccctctatttgcgaatcggcaggaccaatatctgagcctggccccaacttaccatcaaccatcctctcgagaagactgttttcaccagtcataataacccccttatggttataaagcagttttacaagcttgatacaaccaagaaaccttaaccacttttctcaatattcttcaagtgcatcaagggagcaattcgtcatagcttaattcctaggaatagcctttcagtcaacctagccgaattcctctgtagccacaccctttccaatgaatctccaatcttccggcgcctggcggctatcgcaaatacttacttcaatcatctgcccctgtttcggctctgcaggcagaagcgcagctgtacgcaatagctcagtaggactcggtgcgtaggtactctccgaacagtggaaggaccaaagtccatgtttacccgaattgccgatctggcgatccagcttcagcgtccacccttgctctagtcgaaccacccacatatcaggcctccgtaggaaaaatctaattctactaccgcctggtgggagatagagcatctgcctgcccaatcagcctgcttgaacatatccctttaaagggataacctcaaacccaacgttgggctatcaacccaacctccaacgcccctgccgagaaagacatggcctacgaaaagacttggcaccgtgactacgcagcagaatcgctcaagcgagctgaaaccagccgctggacacaagatgccaacctagagtggactcagctcgccctggagtgtgcccaggtggtgcatctagcccgccaggtaggagaggaactgggtaacgagaaaatcattggcatcgccgataccgtgctctcgacaatcgaagcccactcgcaagcgacctaccgcaggccgtgttacaagagaattacgacggcccagacgcacctcctcgcggtcacacttctggagcggtttggttcagcgcgacgggtagcgaatgccgtatggcagttgactgacgacgaaatcgaccaggcaaaagcatgaatagtccccagtgcgatgtcagctatggatgagttggacttcagcggcctgagtgatgaccaactcgtcgagctggccatcgccattgcaaaagaggcggcccggcgcaatccagcgctgcaagcagctttcgccgaagcgctggccaccgaaagggagaagatcgatgctcgccttcggggcgccgaacgggcccgccaatatgaaattcaacaagccgagcgagtagcagaagctgcaagcaaggccgtcgctgacgaaaagatgcgatcaaaacgcaccgagttgctgcgccgatatctagagcaagttgcctatctgattgggagaccgcctcaagagctgacgttagtctggaaaaccagcgactggacacgacgagtatcaggtccccgcctccaggtgaatctcggctccaccggcactgacgtgaagtggcacctgattgactatgccgaggccacggatcagatctggacctcgccagccctggccaagctcactccctccttgcagccttgggctcgtgaagtttgcgtggctgtacgggcgataaatttcgatagaactacggtggcacgaggcgccgaaatatgtccaatgaactgatcaaccccctgcaacagctcatcgccaaggccagcaaaacactgcccgtcaccactggccgggtagccacacaccaagcgagactggaccgtcggcaaggcgaggtcatcatcctggccgacatctccgcatcaatgggatgtactgcctggggccagcgacgcaagatcgacgtattgcgcgaagctgtagacgcagccctggaacgccaaccggcgagattgatcgccttcagcgaccagccacgggaagtccagcacatccctgagccggagagcagtaccaacatgaccgcggccctgcgagcagccttgcaattcaatcccggtgtgactctcgtcatcagtgatggccaacctgacaacgagaaatcggctctcgaagtcgccgcccagtttcgtggcgtgattgatgtgctctacgttggtcccgagattgatcgcgctgccatgggattcatgcgtcgcctggccgcagcggctggcggagatatggtcagcaacgatatatcaagccaggccggcgcccagcgactgttgacctgcattgccggcttactcccggggccaagtcgcgcatgacggaagagcagttttcagcccttgctgagttgatgcgcctgcgcggaggtcctggcgaggatgctgcccgactggtgttggtaaatggtctcaagcctaccgatgctgcccggaagacaggtatcactccccaagccgtgaataagaccctcagcagttgccggcgtggcattgaacttgccaagcgggtatttacctgagcccttcaagccattgcagcgtgttgttgactttaaacttccgcctgtccatcctttgagccgtgagctgctgacgttgtcggcacccctccagtagccgtgatctgcgaggctacagcacggattaccgtgtagatcactccctaggtcgcaccagcttccggaagcgcgatcaatcgaccatcaggttgatggaagccccctcccctgactgacgttttaaaacagccccgtaggggcaacctcactctcttgctgccgaaactttcggtaagcgataccctgcacgcagaacagcttgctttctcagcacagcgactccatatcccaacatcaatggaaggtgaagagatggacgaaaactacatcatcgcccgttcaattaaagaggcaaacaagtttattcaaacttgggaagaagccgacattgaaaaactaaccgacgatcaaacaagagctgcaattggctttgccagcaagatcaattcagagcttcgcgaatggatcagaatgcacctggatggtgagggcacagctcacgaagaaggatacttaaaggaacaacaggctccttggaaaaaagccaacactggtgatcttttcacagatttcggctggtggcaccgcatagcaaacctcatgctacacacggcgtatataaatcatgcgatgctcggcggcgatcagtatcacagtcgactgatgaagattttccgggatagattctcttatcccgaggaatgacttctagagggaaaaaagatgagcaatcaacaaaaaaactttggcgatgcccaggtagcgctggtcgccgcttggagaaagcatccggagctgcgggagtctttagatggcgtcgtttctgaggtgctatcgcaaatagtctttcaaacagagatgctcagcaagcaggcggaaggtttggcaagatatgtccgccgtactcactcagacgaagatgaagttgttcgcgtgctttgttacaacatcgacatccaaatcaatagaatcatctcgatatgcggcgaagtcaaccagcatggcatccgtgtatatggtgatgcaatcgatagggatgtagactgactcgtcgaaatctaatagcaagctgaataccccgctaaactgcggggtttctttttgtgagaaactgcggagagaaacagagaccgagcacaggaagaccttggatgcctgcagcccttgatctaacaggtcagcgcttcggccgtctctttgttgtacgggagaatggccgggtaaaatttggcaaggagcagcccggctggctcgtagagtgcaattgcgggcgccgtgagactcttgcccaggcgctgttgacgcaacgcgggtggcgagagtgctcatactgccagcggccggagtgcattgtttgcggggaaaaggtaccgtcgacccgcccgcggagcgtcacatgctctgacacctgccataaagccaaacgccgtggccaggacatcgaacgttaccacaggcgtgcagctgaccctcagttcaatcagcagaggtatcagcgcctggttgaacgcatggccgacgatcctgacctagccgagcgcgtcaggcaaatccgccgaggcgcaaatgcccgttggcggatgaaacctgaaaaccgcacggccatcaggcattaccaggcactgcgctatgcgatgaaccgagcagaaattctagcgcggaggcgcgcccgcctcgacctgatgacaccggaacagatggagcattggcgagagcgtatccgggcgtatgatcgagcctaccgcgcccgatggcgcgaccaccttcgctctgaccctgaacgacacagggcgtatctcgacacgatgagggagtacagacgcctggctagcaagaactcaaccgaatagctggtagctgcgaacgcataggctcaattggccgagactcgaagcgcaacgtactcagcttcgatctcccgtagagttcgggcaccctcctcgctcattccgctattaggcaactggccgagcaccaaaagcgtactcagtgcatggtagcgagccaggtattcgctccatgcctcatcgaagtgcgcgctctcaatccctgcctccctcttgcgataaaaagcagccacggcggccagttcctggcgcgctatatcgatgatggtttgttcgagctggggaaggtctgtattcatggcctagggcttcctcgaagcagtgttaaccagaaatgacgcagcctagatgcgtgtgaagggcacccagagtcgactgatcttcgcatagcgaatcaggcccggcgattcgccagaatcctatccaaaaaaatcccacccccactcaccgagtatttcctactgcctcaatgggggcagtctgagagggtgtctctggcttcgcgcgaggacactcatgaaacgcccatcccctgcatcaatgattcttggcctctgcttgacggcaatggccggcctgctgggctaccagcaataccaactcattcagctccgatcaggcgtggacagtgccgcggaaaagacctcgctagaggcgatcctggctcgcttgaatcgagtcgacgagcgcctcgacgccgtggatgggcagcacctggtcagcaacgaggacttccgctcaggccagcaggcactgtccaaccgcattgacgccgcgcaggccttcgccaagcaggcctccgacgccgtcgagaacctggctcaaaccaccgcctcggccggcgatctcctggtgctcaaggctacagtggagacgctggacggttctgtccgcacgctgcaagagaagcaagccaaggctccgccgctgatcgtgcctccaccgaagcgcggtgccttccctgtcaagcccaagcccaagccgaaacccaagccaatcgagcctccgcccttctcaatcctcggcgtggagtatcgcgggggcgaacggtttctgtcggttgcacctccgggatccacccagctcagccagatctacctcattcgccagggcgatgccgtcgccggcacgacctggcgactgaccgaccttgacgatcgtaccgcgcacttcgacgtcgccggcgcctcgcgcagcgttcgcatccaaccataggaccccgcacatgaacagaaccgtatcgctcctgtccggcctggtgctgctgctgagctatcccgcagtcggccaggaggctgcggcaagccgagaggccagcagccagctgtccggtagccaactcgacacgctgaaacagcagacatctcagagcgacctggcccaggagtggggactgaatcaacaggaatggacccgctaccagacgctcatgcaaggcccccggggcgtgtactcacctggcattgacccgctgaccgcgctgggcatcgaggcgcgatcggcagaggaacggcggcggtatgccgatctacaggtccaggccgaacggcgccgggtcgagaaggaactcgcctaccagcgcgcatacgacgaagccttcgcccgcgcctatccaggcgagggggtcatccgcctcaccgaaagcagcacggccaacccgtcgggcgcgccgaacatgagcccagcgttgcagagcagcgggcgcctggccctgttcgtccaggacaactgcaccgcctgcatccagcgggtgcgcgacctgcagcagcagaacaaggagttcgatctctacttcgtcggtagccagaacgacgcagagcgagtgcggcactgggcaatcctcgccggcgtcgacccgaagaaggttcgcagcaagcagatcacgctcaatcatgacgagggccgctggatggccctgggactgggcggggcccttcccgccctggtccaggaggtgaacggccgatggcaacgtctgtaatccgcgccctccaactggccgccctgctggtcctggccaacatcgctcaggccgccgtggatcctccgccggcgtacaagcagatcgccctgcccaaaggggttccggccgaggtgctctattcggtcgcgctgaccgagagcaaggtcctgctgcgcggcgaatacgttccctggccctggacattgaacgtcgccgggaaatcctactactacgcgacccgcaccgccgcctgcacagcgctactcgcggcaatcaacctctacggggccaagagcgtcgattccggcctcggccaggtcaatatcggctggaacggacatcgtttctccagcccctgcgactccctggatccgtacaagaacctggacgccacctccgacatcctgatcgagcagcgggacgccctgtatgcatccgccccgggaagaccggtggactggatccaggttgccggccgctaccaccgccccgccggcggcgcgcctgccgccaaataccgtaggacggtatcccgccaccttagccaagtcctcggcgtcaacctactggtgaccaatccatgaagaagatccttgccacgctggcattttgcacggcgttcgcgactcaagcctgggccgccgggctgatcgttgtcgaagacctcggcggagcctcagcgctcccctactaccagggcctggatccgcagccatccgctgccacaccaggacctggcgacctgggtgtccgtggctcaggtgcgtttccagttcgctcggcacgcctttcgccaggccaggttcaggggcgcgccatcaacgccccaggcctgcaacctctgttcctcgtcggcgacgacacgctgtctcgaacctggctgaaagagcgaggcgacgagctccgaggcctccacgctgtgggcctggcagtgaacgtggccagcgaagcgcgcctgacggaaatccgtgcctgggggaaaggacttcagatattgccggcgccggcggacgacctggtcgaccggctcggactgcggcactaccccgccctcatcacatccaccgccatccagcagtaggagtcctcatgactactcacctgatcaccctggtcatcaagcagccgagcgacgctcaggcacgccaactcatgtaccaggagttgctcggcctgatctcacgctacggcggtgaggtgacgtccacggccctcgaggacgaatcgaccctctgtgagctgctggagcagatgctgcccgatcatgaggtagagcaagccaggaaacaggtgctcgaacttcatgccaagcgccgccgaccgggccgcctgcactcgccggcaagcctgaaggtgtaacccatggctggccagtacccgctggaagcgctcttgcggcctgccgtggagctctacaccaccaccgtgtgcttcaccgcggccgcgctctgcatcgtcgcgccgtggacgttcgccctcactccgctgttcggcatcgtggccgcgctgggcttcgtctggctgggcgtcgtgcggctgaagcaggccggcgtggtgctccgctaccggcggaacattcgccgactgccgaagtacacgatgaccagcgccgaaatgccggtcagcaacgaacacttgttcatcggcaagggctttcgctggacgcagaagcatacgcagcgcctggcagatacctacctgccccagttcgcctcctacgtcgagccctcgccgctctacgagcgcgcgcgccggctggagaagcagctcgagttcgcccccttccccctgaagctggtcgccaaagccactgcctgggacgtggcctggaaccccgcacggccgctgccgcccgtgggcggtttgcctcggctccatggcatcgagccgcgcgaacaggacgtaggcctgcaactgggcgagcgcgtcggccacacactggtactcggcactacgagggtaggtaagacgcgactcgcggagctgttcatcacccaggatattcgccgcacccactgccggggccgacgccggcgggcgaagatgggtcggcggacccagacggttcaccacggctatcggcgccggcgcgcagaggagcagccggactacgaggtggtgatcgtcttcgacccgaaaggcgatgctgacctgctcaagcgtatgtacgtggagtgcgagcgtgccggccgcctggatgagttctacgtgttccatctcggtcatcctgacctgtcggcacgctacaacgccgtcggccggttcggccggatctccgaggtcgccacccgcgtcgccggccagctctccggcgaaggcaacagcgcggcgttccgtgagttcgcctggcggttcgtcaacatcatcgcccgcgcgctgcacgcgctgggtatccgcccggactaccagcagatcctccgccacgtcgtgaacatcgatgcgttgttcgtcgaatatgcccagaaatacatcagcgagcacgatcccagggcctgggacacgatcatccagatcgagggcaagctcaacgacaagaacatcccgttcaacatgaaaggacggcccctgcgggtcgtggccatcgaccagtacctgacacagaaacgcatcgccgacccggtcatggaaggcctgaagagcgcagtgcgctacgacaagacctacttcgacaagatcgtggcctcgctgctgccgctgctggagaaactcaccactgggcggatctcggagctgctttcgcccaactacgcggacctcaacgatccgcggccgatcttcgactggatgcaggtcatccgcaaacgcgccgtggtctacgtcggcctcgacgcactatcggataccgaggtcgccgccgcggtgggcaactccatgttcagcgacctggtctcggtggcgggtcacatctacaagcatggtgtcgatgacggcctgcccggctcgctcgctggcggcaaggtccgcatcaacctgcatgccgacgagttcaacgagctgattggcgacgagttcatccccatggtcaacaaagcgggcggcgccggcgtgcaggtgacggcctacacccagaccatgagcgacatcgaggccaagatcggctcccgcgcgaaggccggtcagatcatcggcaacttcaacaacctgttcatgctgcgggtgcgcgagaccgccacggccgaactcctgaccaaccagctccccaaggtccagatctacaccagcacgccggcgagcggcgccaacgacgcaatcaacaacaagaaggcagccttcacctccagctcgcacgaccaggtgcagatgaccagcgtgccgatgctcgagccggcccacatcgttggtctgcccaaaggacaggcgttcgcgctgctcgagggcggcaatctctggaagatccgaatgccgctgccggcggtcgatcccgacgaggtgatgccgaaaagcctgcaggagctggctgccggtatgcgcaagggccaggccgccaacagcgagtggtgggaggcgccgggatactccgccctgcaggatggtctgccccaggacctggtcgacgatttccgtcacctcggcgccggtgaggatgccgcatgatggctgaagtcactcaacgtgcagagcagcaacaagagagccagaagaccctggtcggcaccatcatcagtacgcccttccaatttctcggcgtgatgttcggttcgctggtcggcgcaatcatcgtagagtgggtttgcctgtatttcttctggcctgacgcgggctggaagcatgcccaggcaatgttcgagtacgaactcagttggctgtcgcagggtctgctgcacagcgtcatcgtgcaggagccaggtcgaaccgccacctggctggcccagttggcctatgactggttgttcgtgaagaccgggatagtcgactggatgaccaacatgaccaccatcgcgcaggccgggccacggagccctctggacgttcgctatctcaccgcccagggcgtctccacgctgcagaactacggcctggccgcgctgtacacggtgctgacatttgtcgtgcgcctggtgatcctggtcatgacgatcccgttgttcctgatggccgcgttcaccggcctggtggacggcctggtgcgccgggacctgcgcaagttcggcgccggccgggagtccagctacctctaccacaaggcgcgcggcagcatcattccgctagcggtcgtcccttggacgctctacctggcaatccccatcagcatcaaccccttgctcatcctgctgccctgcgccgcgctgctcggcgtagcggtgtgcatcacagcatccaccttcaagaaatacctctagtcctcgaggagacgctcatggccctaccgcttaaacaactcttgccttcgcgcgacacggctctacacgccagttggatcacgctgactgtccttgtactgctgctttcagcggctgtactcatgacgatgggcaggctcaaggagaccggcacgtattggcaaatcctcgtcgaagtcgccctggtattgctgtcagtccaatggctgctcatcgcaacctgggttcgagtgggtactcgtcgtggtccatggaccagacaggccgttttaactccgctcgcctggctcagcgtgacctcgatgctatacgtctatgccgtggtacaggtgataaatcggttgattccaacaatggagacgatagccccccacgcgactacaggggccgccgagggtgcggcatttctcacgctatgtgccggattttcactatgcctggcgactatgacaatggtcattacgcacctttgctacctgtgtattcgtcaccggcgcactatcggttgagcacctcgaaccagtgaatcaaccaaggcacagcgtgtgatctcaactcgctagatgagaaccacgcgacagcaaaaagcagaatcaaaaagatcaacgcaaatcgccaaattttcatttcgatgccttcagggagacgaacgacaaatgatgccatgccctgactagctccacagccacagcccccctgtttaaccagacacctaccaatctggaagccctcgtatctccggagacacctatgcagtggactcacgaacagtcaccgatcatccagtcgaaggcatcgaagatcctggtgcgggccttcgccggcactggcaagacgaccaccctggtgggctttgccaaggcgaaccctaccctgagaatcctctatctctgctacaacagctcggtggagaaagccgcgaagggcaagtttccccgcaacgtagtctgcaagaccgcccacagcctggctcatgcggtgtacggcatccagtacgcccacaagaagacgaagaacctgcgtctgaccgatatcgcccgcggactcgatacccaagactgggagttggtacgtgacgtgctggccacgctgaacaactacatggccagcgccgacgcggaactcggccgaccgcacttcccgcgcttccgcgacaaggcgttcctcaccagtgcccaggaacgcttcctcaagcagggcctggacatggcgcgagtagtctggaggcgcatggtcgacctccaggacaccggcatgctgatgccccatgacggctacctgaagctgtatcaactgagcaagcccgatttgagccagcgcttcgactgcatgctcctggacgagggacaggacatcaacccagtgatcgcggacattgcccattggcagcgcatcagaatggctatcgtcggcgatccccatcagcagctctaccggttcaggggcgcggaagatgccctgaacagcgactggatggtcggcgccgaggagcactacctgacccagagctggcggttcggccccgcgattgcgcacgtggccaacatcatcctctcctacaagggcgagacacggaaacttcaaggactgggcccgcagacgctggtgaaaaagtccctcccggcggaccttcctcaccgcactttcattcaccgcaccgttatcggcgtcatcgaaaatgccctgcagcgtgtgcgcaataatccggcacccaagttctactgggtaggcggtatcgacagttactcgctgcgcgacctggaggacctgtacgcattcagccgaggcctgcaccaaaacgtccaaaacaagaagctgctccgtgactaccgcgactacacccagtacgtggagatcgccgagatcagccaggacggtgaaatgctgcgctcgatcaagatcatctcgacctaccctgatctaccggcgcggatcctcgagcttcgctcactgacccttgacaatgagctggacgcgacgatcaccctgaccaccgcacataaggccaaagggctggaatgggatttcgtttgcctgtacgacgacttcaacgcggatccgctggcacccgacaccgacccgggcaagcgcgacgatgagctgaacctgatctacgtcgcagtgacccgcgcgatgaagatcctcgccatcaatagcctggtgctatcgatcatgcagcggtacgtggacgacagaaagctgaaggagcagatagctagctgtgaaaaatgactcaaaaaaatgatattggtcacagcgaatgcctgacattgacataaggcaaagagatttgtagccaactcattcagcctaggaagtactcacaccaagactttaacgttaggtcacagcggagcattgagatgaagcttatccttgatttcgacggacgccttctaaatccaagcaacatgctagaggccctatcaaaagcaggaaagaatacaaccatcagcataagcaacgcgcaagcattaaatatagacactcttctcaaggcaacaaccactgcagaaaacacaaaaaacctctcaacaactttcaacggcgcagagctgactgctaacaaccttcaggaagtcataaacttagcaggatcattaaccagagtatccacaatagccgcacaagccattaatataaacacacttctttccgcaatatctacagcaggcaactcaaagagttttagcgcagaattcaatggagcccaactcagcagcgacaacctacttagagcagtaaatgcggcaggcacaaacactagcataagcgtcaacaccgcacaagcgacaaatataaccgcccttcttcagactattcatgcagcaggtaacacaaaaacattcagcgcagagttcaatggcgctcaacttacttcaaacaacattcaacaagctttagacgccgcaggaacccgaacatccattagcgtcaacaccgctcaggcggttaatataagcaccctgctagccctcatcaactctgccaaagacacgaaaaaatttagcgccgacttcaatggtgcacaactaacagcagacaaccttcagcaagcgatcagcgctgcggccgcgggaaccagtatcagcgtcaacaccgctcaggcggcgaatatatccatccttttacaggtcatcaacatcgcgggcaacactaaaaaattcagcgccaactttaatggtgcccaactcacttcaaacaacatccagcaggcgctgcgagcggcaggatcaaacacatcaatcagtatgaactccgcacaatccgccaaccaaagcactctacttgaacttctagacatagcaagttccagcaagcaattccaagccaattacaacggcggcatgtctaatccgagcaacctacaacagatagtttctcgtgcaggcgctagtgcaaccgtgtttatttccgacgcacaaggcctaccaatcgcaaatatccttacccttatatcatctgccggatgatgacttatagccgtggatgaaaaacacaccatccacggctataccctagtccatactgccttttatctgaactagccttccatcgacaaacctaagcttctggtaccaaccattccttggtccgtatacccagttttcgacagtagcagccccccgcactatatagccactaccatccactgcgggcccttcaactttacggctatcagggttgccgcacttcctaagcacatcatcaatcaagtcaccctcactaacaattgccgacccgcatcgtaatgtagcggcagccaccccataactgtccaacatagcagccatggctagcaaaactccaatagagatgtttctaagcatcagccgtctcccttagaaatatatatgaaatatacacccagacgtccatacgtgtctctaaacccgccaaccaccagaaattcactggtgctaggcctagtattttcggttgaggccctcctcctgctcttgaaaccgtgcggttctactcgaaccactccaggagcacgtaatgaagcagaccttcgaataccatgtcgaaaacatcgttattccctacaaaaccctcaccaagggcgtcgcgatgttcaaacacaaagaagataccttggaacccgacgaccacgccttgctcaaccctctgcgctgggccgaggtcgtgcgtctgggccaggaaggctgggagctggtgagcgttcagccactcatgcggggcgtaaccgagatcggcaatcagaacgcccagggctgggcctggggcatcgctctgcccgtcagctacctgctgtttttcaagcgcgcaacctcataaaaaaataccccggacccgcgccgagtatttcttgcggaatggaatcagggcgatcggcaagctgatcgcaccctgatctgcaagagattcgccgtgaacactccacatccatcccttcgccgaagctgcctggccgccttggcctgcagtgcgctggtcgcacagggagccttcgcagcgagcgcctccgagcaggcgaacctggaggtgatgatccggcagctcaacgccctcgaggacaccgcccgccgcagtgcccagggcgccgatgagcccggacagcgcttctacttcgactactcgcgcctggccgctgacctgcagcgcatccgccaaggcctgcaggactacatgacacccagccgcgcccagccgcgtgacccttccgacctgtccgggaattacaccctgcgcggagggccgatgccgtgagcatgagtggagcccaaacatcagcgttccaagccgccgctggctttcccccatcggccggcgaggggttgttcgttggagcagcgatgaccttccttctgctgtggtccgcctgggcgatgtacagcacctggcgcggctgggccaccaacaacctcgacagcgccactgccggcgcttccgcgatacggatcttggtcctcctcggcatcacctctttcttcctcctcagctgacccatacggagacactcatgctgaaattcaccctccagaaactgtccaccctctgcctgcgcctggctgccatctctttggtactcccaggcgtcgccttggctgcactccccaagcccgaggcgcctagccgcggggaaggatcggggatcatgcaaaccatccagaacttcggctatgacggagcgatgctcctcgcgctactcatctgcgtggctgtctttctgggagtctcctggcatacctacggcacctatcacgccatccatgatgggaaaaagaagtggtcggatctcggagcgggcgtggccgtaggcatcggcctgctgatcttgatcatttatctcgtcaccaaagccaccaccatcatgtaagggccttcccatgcccgaagaacatctgtttcaggatgggaccctcagcttcctgccgacccgtttgaaccggcaaccggtggtcatcggcggtctgactgcggacgaaatgtggatcacggtcctcaccagcggagcagccgggttcgttcttggcatcccggctgccttggtcgcaggtaacgcggcctgcattccactgggcgcgctgctggtaggcgccctcggcctgggtatcggcagccgcatcctgcggcggatgaagcgggggcggcccgatacctggttctaccgccaggtggagctggccctctcgctgcgctttcccgtcttcggcaaccgtcgcctggtgacgcgctccggcgcctggaccagtcgacgcacggagtccccatgagtttcagaaaacacaccgcgcaacagcaggctcacatcaacaccttccggttcatcaccggcttcttgtgcatggtcatcgtggtgctggcctactgcgtctgggaagcccgcaaggacctctggatccacattccgcccgacttgcgttcagggagcacccggttgtggtgggacattccgccggagagtgtctatgcgttcggcctctacatcttccagcaggtacagcgttggcccaaggacggcgaggtggactacaagagcaacctgttccgctacgccgcctacctgacgccttcctgcaaagtcttcctggagaaggacttcgagtttcgtcgtaacgccggcgagctcagggggcgagagcgcaccacctcggaaatccccggtcggggcattggcgagagcgatggccgcgtgatccaacactcgatcaatgactggaccgtcaacctggacatggacagcacggagtattacgccggcgaaaagatcaagcgcgcgctggcccgctacccgttgcacgtcatccgcgccgacgtcgacccggagaccaatcccttcggcctgcagtgggactgctactccgatacgcctcaacgtatcgagcttgaggagccggccgcccccaccaagcgggagggaggtctatgatccggaagtcgacaggctcgctcttgctaatgcttgccctacccacactggcccacgcggtggagattctgcgctgggagcgcattccgttggccattccattgacggtcggccaggaacgcattgtctttgtcgacagaaacgtgcgagttggcgttcctcgggatctgcagggcaagctgcgcgtccagagtaccggcggcgcactctacctgctcgccaacgagccgattcctccagcgcgcctgcgcctacaggacgcgaccaatggcgagcagatgctcatcgatatcgccgccaccgaagcaacggccgaccaacagccgcgcgagccggtcaggatcgtcgccggcgagccagtggctccgcattatggccagtcccgggaagcccagccatcggcagcagcgaaacagaccgagcacgcagaagcaccgaaggccgtgccgcgcgaaacgcccgtccccgtggttctgacgcgctatgcggcgcagatgctctatgccccgcttcgcacggtggaaccggtggatggcgtcggtcaggtgcgcgtcaagcgacagctcgacctgaccaccctgctccccagcctacccatcacggctaccgccttgggcgcctggcggctggacgactactacatcacggcggtgaagctgcagaacgccagcgcccagcacctggccctggatcccagggacctgatgggcaatttcgtcgccgcgaccttccagcacccgtacttggggccccggggcgacgcctccgacaccactaccgtgtatctggtgacgcgcggccgcggccttgccgacgcgctcctgccctcctccatcagccagatcgatcccaaaggaggccgtcgtggcgctgaccggtaatcccctcctgaaattgctggtcgtccccgtcgtgatcggcgccatcctgatcggcgtgagcatgatgggcaagaaagaaagtgcgcagtcacaaggcgccgcaaccccgacggtaacgtcggaagaagcggcaaccctgggcatcgacggcgacacgcccgccgacacactacgcaccatcgtggcggaaagccggcagctcaaggaccagatcagcaaggtgatccaggagaatgactcgctcaaagccgccaatgagaacctgcagggccgcctgcgcaacatcgatcagaacatagagcagaagctcaacaataccgcccaggaactgcagcaacagcaggaaaaccgtagccagacgatcctggaccaggtacagaaacggctcgagaacctaacccacattcccgaggccggtgacaccgacctgcccgtcgggttcggcgtgcgaccagaggatggccagcactttcagggagcgggctcgtcttcatcggatatcgtctggatcgagccccaggacgcccgcgcggtcgatgccaatggccagccgctggccgccggctccaccacccaaccgagcggattcagcttcccgacctccttcggcaatgcggtcgatcgcggacagaacgcgctggagcggatcgatgacgggctgcaccccgtcggccaacagcgatccgacctggaaaaccgcaagctcgtccgcaagacctacacgctgccgcagaactcgacgctcatgggctcggtggccatgtctgcgctgatcggtcgtgtgccggtcgacgggacggtcaatgatccttacccgttcaaaatcctcatcggcccggacaacctcaccgccaacggcatcgagctgccggacgtcgccggcgcggtagccagcgggaccgcctcgggcgactggacactctcctgcgtgcgtgggcagatccgcagcctcacgttcgtgttcaacgacgggaccgtgcgcaccttcccggcgccggccgaggaggtgaatgacaaccagagcaacaacaaccagaccgccagcgccgaccagaaaaccatccagggcggtctcggctggatcagcgacccctacggcatcccctgcatcgccggtgatcgccgatccaatgccaaggagtacctgggcaatcagagcctactcacggctgccggggccggcatcgccaagctcctggacgccgacgagaacaacaccagtaccgtcttcagcggcaacggcaccagcttcgggacgaccggaaccaacagcaactcggccctcaacagcatcctctccggcggcgtcagcgacatccggcagtggatgaacaagctgtacggcgaggccttcgccgccgtctacgtgcaacctggcgcacgggtcgccgtgcatctcgatcagcaactggcgatcgactacgaactcaagggccgcaaggtcgactacagctctggagccgctcatgcaacagcagacctggactaacccccttcttcgtctctgcgccggcctggcctgcgcgctaaccctggcagcgtgctccaccagcaaggaggagatgctgccccacggcgaggccaacatgctcgacgtctgggaacaaggtgcaaccagctcgataggcaacagccgtggccggctactcctcgatgccaggcaaacgctgcggcgcccgatcaatccgcagcaggttgcctccgcgaacgaccaggccgactacacccgcacggccagcaacgagatccacagccagttcaaacgactgcccaatcccgacctggtcatgtatgtgttcccgcacctagccggcagcgatcccgccccggtaccgggctataccaccgtgttccccttctaccagcgagtccagtacgccatgccgggcgagcgcacggaggactactgatgggcctttttcaaacccttctgcgcggtcgcacacagcctcagtcggtaccggcagacgctcccgaagattcaggagcgctggacgtagcggccgtggaagaagcgactgagcgctatctggcgcgactggccgccatgggtatccctttacccaacaccgggagcaagaatggcgccacgcaggctgaagcgtcacgcctctacgatcacgacccatcgttcgtcgacctgctgccctgggccgagtacctgcccgacgaacaggtgatgctcctggaagatggacgttcgcgtgccgtcttcttcgagctggtgcccttgggcaccgagggtcgcgatcccaattggatgcagaacgcccgggacgcattgaaagaagccctgcagaactccttcgacgagcacgaaacctcgccctggatcgtccagttctacgcccaggacgagatcagctgggacaatttccaggagcagttgaggcagtacgtccatcctcgagcgcgaggatcagccttcagcgagatgtacctggcgctcatgaagcatcacctggagggcatttcgaagccgggcggactgttcgtcgacaccgccgtcagcaagctgccctggcgaggacaacagcggcgcgtgcggatggtcgtctaccgccggatccgcaaggcggatgcgcagattcgcggacaggacccggcggcgtacctgaagtccatctgcgagcgtatccaaggcggcctggcgaacgccggcatcgtcgcttcgcgcatgggcggacaggagatcaggaactggttgatccgctggttcaacccgcacccggatcacctcggcaagaccgatgcggatctacgtcgcttctacgaactggtatgccggccggacgaaccgatcctgcaggatgacttgccgctggccgacggcaccgacttctcccagaacctgttctatcggcagcctgtttccgatgccacccagggcgtatggctgttcgatgccatgccacaccgagtgatcgtggtcgaccagttgaacaaggcgccgctgacagggcatttcaccggcgagacgctcaagggtgatggcctgaacgccctgttcgatcgcatgcccgaggatacgctgctgtgtatcaccatggtggtgacgccgcaggacatgctggaagggcatctgcagcagctctcgaaaaaggccgttggtgacaaccaggcctcgatccacacccgcgaggacgtggccaccgttcgccgcctgatcggccgggagcacaagctctatcgcggttcgatcgctctgttcgtgcgcggccgcgaccatacccagttggaggagcgctgcatcaccctgagcaacgtgctgctcggcgccggcctggtgccggtcgaaccgcagaacgaagtgggaccgctgaacagctacctgcgctggctgccctgcaatttcgatccgaacgaaaagcgagccctggagtggtacacccagatgatgttcgcgcagcacatcgccaacctgtcgcccatctgggggcgcaccaccggtaccggacaccccggcttcacgctgttcaaccgtggcggcgcgccgttgaccttcgacccgttcaacaagctggaccggcagatgaatgcccacggcttcatcttcggcccaaccgggtccggcaagtcagcgtccctgaccaacctcatcagccagatgctcgccatgtacctgccacggatgttcgtcgcggaagcgggcaacagcttcggcctgctggccgacttcgccaagcggtttggcctctcggtccaccgtgtccgcctcgccccgggctccggcgtcagcctggcgccgttcgcggacgccatcaagctggtcgagagtcccgaccaggtgaaggtcctggatgccgaagacatcgaggcctcggactcggtccagggcagcaaggccgacctcgaggacgatcaacgagacatcctcggcgagatggagatcgtcgcgcgcctgatgatcaccggcggcgaagagaaggaagacgcgcgcctgacccgtgccgatcgcagcgccatccgccaggcgattctggcggcggccaggacctgcgccgccgcgaaccgcacggtgctcacccaggacgtgcgcgatgcgctctacgaggcctccaggagcgatggctccgcgccagaacggcgcgcgcgcctggccgaaatggcggaagccatgcagatgttctgcatgggcgccgacggcgagatgttcaatcgcaaaggcacgccctggcctgaagccgacctcaccgtggtggatttcgcgacttacgcgcgcgaaggctacgccgcccagctcgggatcgcctacatctcgctgctgaacaccgtaaacaacatcgccgaacgcgaccaattcaagggccggcccatcgtcaagatcaccgatgagggacacatcatcaccaagcacccgctgctgctgccctacgccatgaagatcaccaagatgtggcggaaactgggcgcctggttctggctcgccacccagaacatcgacgacatcccagcctccggggcgccgatgctgaacatgatcgagtggtggttgtgcctgaacatgcccccagacgaggtagagaagatctccaggttccgcgagctgtcgccggcgcagaagtcgatgatgctctcggcccgcaaggaaagcggcaaattcaccgagggcgtgctcctggccaagggcaaggagtacctcttccgtgtggttcccccgagtctctacctggccctggccatgaccgaaaacgaagaaaagaaccagcgctacaacatcatgcaagccaccggctgcgacgagctcgaggcggccttgcaggtcgcagcggatctcgacaaggcgcgcggcctgccgcccttcccaattaatttcccagaccaaccggcagtggagtgccaggacgaatgagagctctgaattcgctgacccagaacctgatcgacaacctgacccagatcctgcagaaccccgaagaagatgccctgcagacgctcaggatatgcgctcctgtactgatcgaggagctgcagcagattcaactgagggcggtcgatcgccgggacatagtcccgcagataaagcagctcctggatgaatggctgcaacagcatccacagcctgatacggcccaacaggcgctcatcgaggccgtggaccgtgcggaagtcctacagcggaggcaagcgtgagactgttgaagggcggctgggcagcgaaacgatttcaaggtcccgccctgccctgggcggggctgctgctggtcttgctggctgtctccgccctaggggtcgagcttctggtgaagggtctaccagccaaccacagcctctacggcgatgcgaaggcgcgctggacgatcaatgaatacgccgacctggagtgccccttctgcaaggtctacacaccgcggctgaagcgctgggtagacagccatccggacgtgaacctggtttggcggcatcttcccctgcagatgcatggcgaggcggcccgccatcaggctcgcctggtggagtgcgcggggatccaaggcggcgccaaagccttctggagcgctatcgatgcgatcttcgctcagtcggccggcaacgggggcgggctgcctggcggcacattgcactttcctgaactggaccaggctcgactggaaaaatgtgcgaaagacatggacctggtggaccggttgattaagacggacatcgacactgcacggtcgaacggcattacagcgaccccgaccctggtcatccgggacaaccagacgggaagaagcgtgaagctggagggcatggccgacgagaccacgttgctgtcggcgatcgactggttggccagggaccactagcgtcgctctaggagcgtctggacgaagaaatcggagaggatgccaacatccattttttgggactccagaatgctctgcacgtcacctggcagcatctcaacctcatccccgtccacgatctttacaatcttcttgcggccggagctggtgaggctgagcttgaactccatcgccggccgggcattgatatagatgctctcgagcaagcgctccatgatgtcgactcccacgttaatatcaactagccatctatcaaccgctaagtatgccctccagatgacgatggagtcacccctgccgctgttggcagcagctctggatacggctcgaaaaatacactgccgacgggctgatggtttcctgctgccccatcgcaagcgatcctgtctgctgtctataccttcctcgaaccggtacaaacccgcacctcttcatcgcttccccaaatgggccgccacaccccctggctatcggcttactcttggtactactcactagcgcgtgcctgacctaaccaagactacaaaacgatagacggttcatctttcctcataacttgaggttactattgaatctcatccaaccctcagggttaaggagattggaatgcttattaaaattcttcgaattatattcttgttgcctatagttggtttggcacagcaggctgctgcctccccgcccgcagagtcacactcggatgaacaatctgaatcttcgtgtatcgatgtacaagtcaatggagcacgtagcctgtcttacaactgcatggctcagcaaatgactccacccaaagaggatcctcggcgtcggaaccctaccttgaactccacattagcgtctgaacgcgccactcgcctgccacccacacagacaggactttttaccagccttcatcaacgtgccatatcgaactcgaaagactagccctcagccaaacgacttccagcctatgcagggcactctatagagtgccctgcagcacattcacaagctgaacaccttgaaataaaagcctactaaggcgcatccttatttcaaaaccacatttattattcctgacacattctggacctcaccatacactgcccgcccatcacgataactgtagctcattatcactggaatcgttgttttgaatgcagtgcaactgtagtttacaacaacagatccgccatatggctcaacacccaattgaatgtcggtcgggccgacccatgacacattacacccttgagatgaattcccaggtgtattgtaaccaacacatcgtagatctgatgttcccctgctaacaccgtctggatagaaattggcataacgtggagcataaagatttgcccggcaagatgttgtgaacttcctatctccgccggcagaaacagtgaccgttcctggtgaaggcattgccgaaatgatcatcctttgcagaggagggagtgtaggcgctctttgactcgacttcatattacttggaagaatcgaacaaactacaacatcttcaacatccacaccctttgagacttcccccagacttgttatttcaactccaccctgcgcccgacatatctcacttccatcatttgagccctcatcagcacacgcaaaattgctagccatcaaaagcacagtcgacataacaagtgattttttcattttcaaaaagacctctccaggctaaaaattattcattcagtgaatacccagctcattgggcggctttcgtatcagcttctctgattcaagaacacgaccttcaattggatcgcagttcagccgattcaacctcacactcccctcttcattatcattaactccggaaatcttttgctctctctcaaagcagtgctgcccaatctcatccgatacacctccaccaccgacacacccatagatggggacgatagagaattcggaaaaaatcgtacgctaagcttcgcgagttcttgtaaccaattcattgttttttcaatggatgaaagaaaatggcgaaagctatttgacaaacaaatcgggatcttataacttacctaccaagtagtcggtagatgaaataaagccatgaaactcaattcagatctttcgcagcgtgttgtcgtcgagccttcaagcttacagtgggtcgattcgccagcgaccgggattcaacgccagttactggagcgtgatggcgacgaagtggcgcgtgccacctcgatcgtgcgatacgcgccgggctccgcttttgaaaatcataagcacgacttgggcgaggagattctggtcctggacggcgaattcagcgacgaatccgggaccttcgggcctgggacttacatcaagaatccaccaggttcttcgcatgcaccgagctccgcgacgggttgcacgttgttcgtcaagctgcgccatcttgatctagccgacagccaacgcaccgtggtcgacacccgtaacggcccctggtttccaggcctcgtgccgggtctgtcggtgatgccactttctgagttcgacacacaacatacggctttggtgcgctgggccccggggacacgattcaattcgcatcgtcactacggcggtgaagaaatctatgtgttggaaggcgtctttgaggatgagttcggaagctaccctaccggcacatggatgcgcagtccgcatttgagtgctcaccgtcccttcagcaatacaggctgcaccatcctggtcaagacaggccacctgccagtcgccgaatcaaatgaggcgcttgcatgaagcatttctccgaaatctcgccgaccgccgagcgggtggtcgatgccgctgaagggttggtacagcagcacggctacaacggcttctcatacgacgacgtggcccagttggtaggcatcaaaaaaccaagtatccaccaccactttcccaagaagggtgaactcgtggccgtggtcgcacagcgctacacgcaccggtttcgtgaggagttgctgagcatcgaagggcagcatgcgaaagcgcctgacaggctaactgcgtatgcggcacttttcgaacgcaccttcgccaaggaccggcgcctttgtgtctgcggcatgttgggtgccgagtcggactcgctgccggacgccgttgtgagcgaggtcgagcgattctttaaagtcaatctcgactggttgactcttgtcgttgccgatggtcagcgtgccgcgctgatcacctcgaattccaccccagaggctctcgcagaggcattcttgtgcgcgttggaaggctcgatgatggtgggccgtggcatgcggtcgtcacgcggaccggccgaagttggaaacacttttctttccaccgtgttgacctgaggtcggcactttttttgcaacacaaccctaccatttagttggtagttaaggagattattatgagtactgaatttaatggcaagaagttgttggtcatcggcggcactagcgggatgggactgcaaactgcccgcatggttcttgagcaaggcggaagcgtcgtcatcgtcggtcaccgtgaagacaaggccgaagaggcccgcaaggcgctgtcgtcgttgggcaccgtgaccgccctgactgccgatctctcgcgagccgaagatgtgaagcgactcctgcataccatcgatgaacaccacaaggacatcaatcttctggtcaacgcggctggggtgttcttcccgaaggcgtttcttgagcacacggaaagtgattacgaacaatatttgacgttgaataaagcgttcttcttcatcacacaaaaagtcgtggccaatctcgtggccagcgagcgtcccggcgccattgtgaacatcggctcgatgtggggcaagcaggcgattgcggctacgccgtcgtccgcgtattcgatggcaaaagcaggtttgcattcgctgacccagcaccttgcgatggagctggcatccaaacaaatcagggtcaatgccgtttctccggcggttgtcgaaacgccgatttacgagggattcatacccaaggccgaggttcatggcgccttacagggattcaacagcttccacccaatcggcagggttgggacgccacaagacgtcgccgaggtcatcctcttcctgttgtcggacaaggcagcatgggtgacgggcgcaatctgggacgttgacggcggcgtgatggccgggcgtaacacataatgggggaacgagaaatgaacacaaacattaaaggaactcccggcaacgggatcaacgtcggcgcattgcgtgagtttgcagatcaggtcgcagcaaagcccgccgcaggcatcgcgacgttcggcgtcgtgacaacctgggagggtggcacccggacgcgtgcgcgaaccatgccgctcgtactaggtgacacggccttggcgcgcggctttgtcatcgacgcggacgaaccggcagaattgctcggtaccgacacggccgctaatccacaagaattgatcctggctgcgttgaacgcatgcatgactgcaacctacgcggcaaatgcggcggcaatgaacatcgagttgcaatcgctgactatccgcacgaagggaagcctcgatctgagaggttttcttggaatcgatcctgggatcaatccagggtacgaccaggtcgagtatgaggtcgaaatggagtcgtcggcggattcggcggcgctgaaagcattgcacgcgcaggtgcagcgaacatcgccgaattaccacaacttcgcgagagccattgatctcaaggccaagctgaccattctccaatgatcgagtcagtgtttcccgtggttggctgacgggaggccaaaccagatgcgctatgacggaaggttcaaccttccgtcatcacgttctctggaatacgcagtgtcaatttgaggtataccctaactggatgtcaggcagaaccgcgcagctccgtcagaatagagtcttctttcgcattctttgacacatgcccgcaaaggtcatagatttcagcctgacaaaagcagggcttgaggcgcaacggaacagaaagtgcacttagcccccttgctcaccttcaacgcggagttgttctgatgacctttctatgggttggattagggttggtagtcgccgggctgtggtggggaacggttgtctggcggcgggagcaggcagacccttggataaatccaccaactcccgaggcgcggcgtttgcttcgagccgcgagcctgcatttgcattgccacattctcggcaggcctgcggtagaccaggacgcgccgtcgttcgttggggtagatgccctccaggcactttatctacgtgacggggtgatctttttcgagaaggggatcgccaccttgccggatggaacccaagtcgagctgggggcactcactcatgaagtgctcgaagtgcttcgagaaacctacagcgccttggatgccgcttcagcagtgatcactgactatgccaccaccttcaatactcccgaagagttagagaagagcgagaatgaaatcctgcgaaagatcgctggctacgggaacatgtacccgatgcagagcgcgatcgctcgactggcattgttactcaatctcgatcccgacaagaacgatgttgggattggcggcaaagtgttgtgggagcgcatccgccgttggcgttggcccgagcgccatttctcggcggagcagtaggcgtgcagggacatcgcattggctacgtccgggtcagcagcttcgaccagaacccggaacgccagctggaggagaccgaggtgagcaaggtgttcaccgacaaggcctcgggcaaggacactcagcgcccccagctcgaagcgctgctgagcttcgtccgcgaaggtgacaccgtggtagtgcacagcatggatcgcctggcgcgcaacctcgatgacctgcgccgccttgtgcagaagctgacccagcgcggcgtgcgtatcgaattcctgaaagagggcctagtcttcaccggcgaggactcgccgatggccaacctcatgctgtcggtgatgggtgccttcgccgagttcgagcgcgccctgatccgcgagcggcagcgtgagggtatcgccttggccaagcagcgtggcgcgtaccgaggccgcaagaaagccctgtccgatgagcaggctgctaccctgcggcagcgagcgacggccggcgagcccaaggcgcagcttgcccgcgagttcaacatcagccgggaaaccctctaccagtacctccgcacggacgactgatacatgccgcgtcgcttgatcctctcggccacggagcgggacaccctgcttgcgttgccagaaagccaggatgacatgatccgctactacaccttcaacgactccgacctgtcgctgatccgccagcggcgcggcgacgccaaccgcctaggcttcgcggtgcagctcagcctgctgcgctaccccggctatgcgttgggcaccgacagcgagccgcccgagccggtcatcctgtgggtggccaagcaggttcaggccgacccggcgagttgggcgaagtacggcgaacgcgacgtgacccgccgcgagcacgcccatgaactgcgcacctacctgcaactggccccgtttggcctgtccgacttccgcaacctcgtgcgcgagctgaccgagttggcccagcagaccgacaagggcttgctgctggccagccaggctctggagagcctgcggcagaagcggcgcatcctgccggcgctgagcgtaattgatcgggcctgctcggaggccattgcgcgggctaatcggcgggtctaccgcgccctggtcgaaccactcacggactcgcaccgtgccaagctggacgaactgctgaagctcaaggccggcagcagcatcacctggttgacctggctgcgccaggcaccgctgaaacccaactctcggcacatgcttaagcacatcgagcggctgaagacatttcagctggtggacttgcccgaagggctgggccggcacatccaccagaaccgcctgctcaagctggcccgcgaaggggggcagatgacgcccaaagaccttggcaaattcgagccgcagcggcgctacgcgaccctggccgccgtagtgctggagagcaccgcgactgtgattgatgagttggtcgatctgcacgaccgcatcctggtcaagctgttcagcggcgcgaagcacaagcatcagcagcagttccagaagcagggcaaggcgatcaatgacaaggtgcgcctgtactcgaagatcggccaggctctgctggaggcaaaggaaaacggcagcgatccgtacgccgccatcgaggcggtgattccctgggacgaattcaccgagagcgtcagcgaggccgagctgctggcccggccggagggcttcgaccacctacacctggtcggcgagaacttcgccaccctgcgccgttacacgccggccctgctggaggtgctggaactgcgcgctgcaccggccgcgcaaggcgtgctggcggccgtgcagaccctgcgcgagatgaacgccgacaacctgcgcaaggtgccggcggatgcccctaccgccttcatcaagccgcgctggaagccgctggtgatcaccccggaaggccacgaccgacgcttctacgaaatctgcgcgctgtccgagctgaagaacgccctgcgctccggtgacatctgggtcaagggttcacggcagttccgcgacttcgacgactacctgctgccggcagagaagttcgccgcgctcaagcgggaacaggccctgcccctggcgatcaacccgaacagcgaccagtacctggaagagcgcttacagctgctggacgagcagttggccaccgtaacccggctggccaaggacaacgagctgcccgatgccatcctcaccgagtccgggctgaagatcaccccgctggattctgcggtgcccaataccgcgcaggcgctgatcgaccagaccagtcagctgttgccgcgcatcaagatcaccgaactgctgatggatgtggacgactggacgggtttcagccgccacttcacccacctgaaggacggtgccgaggccaaagacaggacattgctgctgtcagcaatcctgggcgatgcgattaacctcgggctgaccaagatggccgagtcgagccccggcctgacctacgccaagctgtcctggctgcaagcctggcacatccgcgacgaaacctattcggcggccctggccgagctggtcaaccaccagtaccgccatgccttcgccgcccactggggcgacggcaccacctcatcctccgatggccagcgcttccgggcgggcggccggggcgaaagcaccgggcacgtcaacccgaagtacggcagcgagccggggcgactgttctacacccatatctccgaccagtacgcaccgttcagcacccgcgtggtgaatgtcggcgtgcgtgactccacctatgtgctcgacggcctgctgtaccacgagtccgacttgcggatcgaggagcactacaccgacacggccggtttcaccgatcacgtcttcgccctgatgcacctgctgggcttccgcttcgcaccgcgcatccgcgacctcggcgaaaccaagctgtatgtgccgaatagcgtccaggactacccgacattgcgcccaatggttggtggcaccctgaacatcaagcacgtccgcgcccattgggacgacatcctgcgcctcgccagctcgatcaagcagggcaccgtcactgcctcgctgatgctgcgaaagctcggcagctatccacgccagaatggccttgccgtggccctgcgcgagctgggccggatcgaacgcaccctgttcatcctcgactggctgcaaagcgtcgaactgcgccgccgcgtgcatgctggactgaacaagggtgaagcgcgcaactccctggccagggcggtgttctttaaccgcctcggcgagatcagggatcggagcttcgagcagcagcgctaccgggccagcggcctgaacctggtgacggccgccattgtgttgtggaacacggtgtacctggagcgcgccactcaggggttggtcgaggtcggcaagccggtgaacggtgagttgctgcaatacctgtcgccgctgggctgggaacacatcaacctgaccggcgattacgtctggcggcagagccgcaggctggaggacgggaagttcaggccgctacggttgcccggaaaaccttagcgtacgattttttccgaattctgcgggctcccctagatgagagcaattaaagaaaatagagagaagtacctatatccgacccaaccacccatcttcataccgcaagaaaaatacaacattttcgtcacacctttgtaattctcaaaagttacccttcacctagaaaaaccctacccccaatttcgcttcaattctgtttcagaagacaacaactatctaatttactagtaggaatctcagcgcagccgtcctgcctcttagcaacaaaaacaactgtttcggcagtgactgctcagtccgcgcaaacacctgaaaacaagatggcttggaatctcacttctaccttatgagttaccaggcgccctcctctgcaccatgcgccaacaactcgccaatacggaggtaaaaaataccccggcgacgtagtgatgatttcctgctgccctatcggaagcgatcctgtctcctacctgtacctattcgaaccggtacagacccatgcctcttcatcgttcccccccagcctggtggccacgccccctggccgttggcttactacttgtactgctgaccggcgcaagccaggccgaaacctgggtcatcactgaccaggcccatccggtcaccgccaccggatcatcgcgagtcctgctcctggatgcccagcaacaccttgaggagcaactgactgacgctctgcccaaggatcctcaacaagctcaggtagcgtttcagcagttgctacagagccccgaggggcgacgcctgcaggcagagctggtgaaggcacaacaagacgtcaccgatgcgtggagtctcggtgtcgagaagatccctgccgtggtagtcgacaggcagtacgtggtctacggcgaaccggacgtaccgcgcgctcttgagctgatcgccaaggccaggaggacgcgctgatgaccagcctcaacctccgccgcctggcagcggcggccgccaccttcagcctctcgttcacggccgcggccgcgatcaacagcgccgccatcgtctcctccaccctttcccctcagtgcctcgaatacaaggtcgtcgggatctgctactggctgctctgcggcccgcatggctgcaaggtgaagacgtcggtcaaggtccgccactacgtgcctgacgcagtcgtctccagctatgcgaataccgggagcaacccctggacggaagtgtcggcgctgggcacaccgaatcccctcgcccaggccggcaatgacgcgaccaccaaccacaaggccgagaacagcatcggccgcttcaaggaagcggatgtgatcggccatcctggcggggccacgttcagccggttcgccagcgcctctgggtacgtttgccctggcgccaccttcccgctggtgccgtacttcctcagcacactggacgccattggctggcggcatggcattcccgagcaggtgtaccccgaagcgttggtcccagggctgcgcgaggtgggtggaatcttctccggcgacatgtgggggaacctctatccgcgcagcggattcctgcaccagaccgacgactacaagacggcggccgtcatcgcccagcgcgccggcgacatcaccacgcgaatcggccagctccacgtctacctccccatgcgcgcagcacccaaggacggctactggccggcgggcgagctgaaagagggcgatgcctcgaccgggaaatggcaggagctgaccccgtccctgagcctcaactgcgcggtgtttcccaactcagggccgaagacgcaggccgtcgacggcgattacgcctgggcgctctggcgtccctactcctgctgccagcgcaaggggcagatcttcctcggcagtaccgacttccaataaggacacggagacgaatcatgcgaatgaacatcacctcggtcgcgctgacgtggctgctcgcagctcaacttgcccaggccgacgacccaatcaacgtgtccaagaccggcacggtgctcagcgacgaggtcctatacagcattggcggcggcagtgcggtgagcatgggcagcgccggccagatggactcgatcggcgtcggtttcggctggaacaacgacctgatgtgcggaaacatgaacctgagcaccaccctggagaaccagctcaacggtgccacacagggcttccagaacatcatgggctcagtcatccagaacgcgaccggcgcggtcatgtcgctaccggcgttgatcatccagcgcgcgaaccctcagctctacaacctgatcaccaatggcatcctgcaggcgcggatcgactacgaccgctcgaaagggacttgcagagcgatcgccgagaagatggctgacatcgctggggagcagaccggctgggggaaaatcgccgaaggccaggccctgggcgccacgctggcctctggcgggaaagacgccgtatccgccctcgaagtagtggagaagaagggcggcaacgatggcgtaacctgggtcggtggagacaaggccggcggctccggccagaagcccattcgcatcgtcaacgacgtgacccgggcgggctacaacctgttgaccagccgctcggtgaaagactcatcgagcgtgccttccgccagttgtaacaacggcctggtctgcaacacctggtcctccccccaagaagccgctgcattcgccacccgggtactgggggagcaacagcagcagacctgtgaaggctgccagaagacggtgacggctgcaggcgtcggcctgaccccgctgatccaagagacctacgacaagaagctccagtcgctgcaggagctgctatcgaaaagtaagccactgaccgccgagaacctggctgcggccggcaccgatgcgctgccaatcacccgcggcgtcatcgaggcgctgcgcgacgagcgtgaccaggacgtcctggcgcgccgcctggcgtccgatgtctccctgatggacgtgctcagcaaggccctgttgttacagcgcctgatgttcgccggcgccaaggagcccaacgtcgccgccaacggcctggccacccaagccgtcgatcagcagaccagcctcctgcagcaggagatctcgaacctcaagaccgaactggaactccgtcgcgagttggccagcaattcgcccatgcgggtcatcgagcgcgggcaacagcgcgcctcagggtccagtggcgtgttcgagtcggcgcccgatgctgatcgcctcgatcgcctgcaggccccctctgccgccggcggcaagtcgggagggagaccgtgatggcagatacgctcaccacccgaaagctcctcggccagctactggtcggagtgctgatcgtcgtcggcctggcagtggtcggtacgctgctcagcctctttgccctgaaccacttcggtggcatccagggcctggaggcctggcggcaaagcaactactggagcttgttctcctggagggcgctgctgtactgcgccctggccatcgcctggttccggctcaagcagcgcaaggagctgagcgcgcatgagcggcagcgcattcggcggatcgagatcctggtgctgttgctgatcctgctcatcgaattcagcaaagcctacttccgcacgggaggcgcagcatgaccttcatgaccaatgactacctggagtattacctcaccctcctcggctggatcatcaacaacgggatctggaacatgatctcggacacgggcctgtttgcggtgccgttcgcggccatcgtattgcgcgaatggctgaaagttcgcggggaaggcgccgacgagggcaacaagggcgtgctgtctctggcccgcatcgagacgcatatctacgtcggctacatcgtggtcgccctggcgggaatcccggtcgtcaacgtgagcttcgacaccatcgagttcgaccaggcccgcgcccagcagtgccagtacagcctgccagcgccggcagacaccggctggtcgaactccttcagcagcctggccggcaagagtgcgcagatgccgctctggtgggcgatgatgcacgccctgtccaagggcttcaccgccggcgcggtcgcggccattccgtgcggcacggatctgcggcagatgcgaatggaagtggacaatacgcgcgtgaacaacccgctgctggcacaagaaatcgctgatttctccagggactgctacgggccttcccgtgcgcggctgttcatgcgacaacccgatctgggctccgtcgccgaggacaacaaggcgctgcaggacctgaactggatcggctcccgattcctgctgaacaccccggggtactacgacaccgactactcgaagagtccccgtcagtcgtggccctacaacgccacccgcgacgccgggctgccccaggtgggcggtggtggtggctaccccacctgcaagcagtggtgggctgactcagggatcggtttgcgtgatcggatcaaggaccaggtggatccggacctgatgaccagcttcctcaagtgggcaaaatggctgaaccaggaggaggtaaccgaggcagtcattcgccaggtgatctccccctccagccaggtcaaaggcaacgtctataccgactatggtgggcaggtgggcggtacggtctggaacggcatcgcgagaaccgcaggaaccttcggcgttgccctgggcagcctggcctatttcccggcgatggatatggtccgccaagcactgccgatggtgatgtcgttcctcaagatggccatggtcatctgcattccgatggtcctggtcatcggcacctatcaactgaaagttgccatgacgatgacggtcgtcttctttgcgatgatgttcgtcgatttctggtttcagttagccagatatatcgatagcacgatacttgatgccttctatggttcgggatcaccgcatctttcatttgacccagtcatgggactgaacacggcgactcaagatgcaatcttgaacttcgtgatgggggcaatgtttattattctgccacttctctgggtcacagcaataggctggtctggtgtgcaggcaggacaagtcctccaaggcctttcccaaggcaccaaggacgtccagacagcaggtggagaagcggcaaataatgccaagcggcatatattctaataaataaggcccaactgggccttatttaatcatcagttcgctggccggcaacataatgaccatacccttgcgggccatactcatatccgtagccagacgtgttttctttccggggaccatttggaagccccccaaaggcgagaacagctccacccagaactatcagtgtcagggcgccacttaaaagccagctgaaagcttgagatgccagcacaagaagagtgccggatactaaagtgcgcttcacccaacgacggagaggcttgggatcggtgatgagaaaacgcacaaacgtacccagaccaaatccgatccgagaggcgaaacctttgttggcgtgtgcgttcattatcaatctcctgactcccaaagggaggcatcctgctatcacctatacgccaaaaaagatgatttggcaagccttatggcatattatgccactagctatttgccgactggagcaccccatggcaactcgaaacgtcgtccttcctgatccgatggagcaggacatcaacgaactggtggagaccggccgttatcaaaaccgcagcgaggtcatccgggcaggcctacgcctgctgctgcaacaggaagcccggaatagcgccaagctcgaagccctccgcaacgcaacatccagtgggctgatgcaactggaacgcagcgagtacgacgagatcaccagcgacgacctggcccaatacctcgacgagctcggcaaccaggcgagccactgaagcatggccaagtaccgcatctcccatgatgcccaagcggacatcgtcgatatcctgcgcttcacccacaaccgcttcggcgatgccgcgcgccgacgttaccaggcactcataggggcggcgctggaagcagttgcgacagacccacaacaggtaggcagcatcagccgtgaagaactgggagcaggcctgcgcagcatccacctcgtttactgccgctcgatgcccaatgtcggtaaggttgttcggcccaggcacttcgtcttctaccggatggcgacagaccaggtgctcgaggtggttcgcgtgcttcacgactccatggatctggatcaacacctgccccatcggtgagcagctgtagcaggagcaaatggcccaaaggggaaatgggcttgaagggcgaagggaatggttcacaagggtaaaagccctacccgaaagggcctgccggaaggcagaaatggctgcgttcgcgccggcgaacacgaaaaggctacgggtgaacatccatcagcaggtgcccaatggttgagcctggcgcagttcctccccggcagagcacaaggccgggatggcacattgccaacaaaatacccttccccgctaccgttgttttatcgttgttgccagcccctgatctggcggaaaagcccgctccatgaatcgtcatggagcctcccatgtttcaactcctttcctggatatccaggaagccgtcccccaccccaccaaccaaagctgccccagggggattcatccctcctctgagcagtacggagctgctcggcacgcctcggcgccggcagctactggagaacatctggcagcgtgcctcgctatccaagcagcaattcgaggagatctaccggcggccattggccaactatgcccagctggtccagcagctcccagcttcggaaaaccatcaccatgcccatccaggcgggatgatcgatcacggcctggagatcgtggcctatgcactgaaggtgcggcagacttacctgctcccgatcggcgcagcgccagagtcacagtcagcccaagctgaagcctggtcggccgccgcggcttatggtgccctggctcacgacataggcaagatcgtcgtcgacctgcaggttgagctgcaggacggcagcacctggcacccttggaacggaccgatcaaccagccttaccgcttcaagtacgtgaagtcccgcgaataccagcttcacggcgctgcctcagcactcctcatccaccaactgcttccgcgcactgcactcgactggctcagtcgctttccagagctgtgggctcaattgatctatctgttcgcagggcagtacgagcacgctgggatcctcggcgagatcatcgtgaaggcagaccaggcctcagtcgcgcaggagctggggggtaatccggatcgagcgctggctgcaccgaagcagtcgctgcagcggcagttggcagacggcctgcgcttcctggtgaaggacaaattcaagctgaatcagccgggcggcccgtccgacgggtggctgactcaggacgcactctggctggtgagcaagcccgcggccgatcagttgagagcctacctgctggctcagggaatcgaaggggtcccctcctccaacgcgccattcttcaacatgctccaggaccaggccgtcatccagacgaacgccgaagacaaggccatttggacggccacgatagacaatggtgctgggtggagaaacaagttcacgctcctcaagatcgctccagccttgatttggacagaccctaccgagcgtcccgcgccctacggcggatcactcgtaattgaagagggcaacgcctcccctgaaaagccggaaacgacctgcgaaatccccaacgatccgattgaacagcgacaggtactagaagccaagatgacgctccgccaacctgcgccgatcgttgcgaaaccgtcaaacgagatgcgggcgattgcgaagccctcaactgatgttcaggaagaaacagacgatttgtacgcgcttcttggtaatatcaattcgccactagaagagctagacattagccacgactcaccggctgcttctcctacgaacactcgcggggaggagaacctacagcagccactagggaacaaggagctaacagattgcgctcctgaagcagttgaagatgtatttatgcctagcagaagcactgatctgggacagggatgacctgcccccagttttagtaccgctgcctagttagtaggccctggggttgatattaatttttcctgcttcagctgctgctggcgagttcgccaacttgcagcaaattctgctggggtgagattgccaatcgcgctgtgcggtcggtgttcgttgtaatcccgccgccaggccgcgatgcggattctcgcttcggccagcgaacagaaccagtgctcattgaggcattcgtcccggaacttaccgttgaacgactcgatgaaggcattctgcgtgggcttaccaggctgaatcagcttcagcttgatgtcgcgctgataggcccattgatcgaatgccttgccggtgaactcgggcccctggtcggtgcggatcgctttcgggtagccgcgaaaccgcgccatctcgtccagcgcccgtgtgacgcgaaagccgctgataccgtgctccaccaggatgccgaccgactccttggtgaagtcatcgaccaccgtcaggcatttgatccgccgcccggtgctcagtgcatcgaagacgaagtccatcgaccagacctggtttggtgcgctcggcaaactcagacgttcgcgctccaccgcgacgccatggcggcgccgccgccgtttcaccatcaagccggcagcgcggtacaggcgatagatccgcttgtggttgacctgcacgccagcacgtcgcagcaggatgtgcaggcggcgatagccaaagcgccggcgctcttgggccagttccaccagttgggcttgcagctcggtgttttgcacactggctcgcggctggtagcgcaacaccgagcgggacagcccgatcaactgacaggcacgacgctcggagatgccagttcgcgcctgcatctcctgcaccgcctcccgccgtgctgtcgggcttacccttttccccgggcgaccactttcagcgactcgatgtcgaggtgggcctcggcgagcaacttcttcaatcggctgttttccagttcaagatccttcaaccgtttggcgtccgccacggtcataccgccaaacttggcccgccaggtgtagaacgaggcatcactgaagccgtgtcggcgacacagttccttcaccggcacaccggcctccgcctgcttgaggaagtcgagaatctgctcttcggtaaaacgctttttcactgccgtctcctgctcggaaaacggactctactaagtttgacgtggtactgaaatcggggggcaggtcagggattcgttggctggatgaaatctggtatcgcgacccgtcgcctgttcatcaacgacaccaaagccttggtgcataccgtcgacgggaccgccatgctggtcacgccaggaatcttcaagcgttatgtccaggagcatccggagctcgaaaagctggcccaggccaaggagacgaccggctggaagctggtgcagcgcgcgttcgagaaacaagggcttcaccggaagaccagtaagagcctgaacatctggaccatcaaagtctcaggccctcgtaaaacgaaagagctcaaggcttacctgctccaggatcccaaactgctgttccctgaacagcctctggacaacccaagcctcacggtcattaccgacgccgaagggggtgtcgaatgacgccgcagcagctcaccgaggagtacatcttcgcgcacgatctccgagaagccagcgcgaagatctaccgcgccgcgaccaaggcgctgctcaagcacttcggccctacggcaaccgtacaggaagtggaccacaggtctgtgctgggatggcggcgcaaggtcttggaacaaggcctgtcgaagcggagctggaacacgtattcgaatcatctgcgaacaatctggggctatgccatcgagcacgagctggtgacgcactcccaagtcaacccgttcagaaagaccaccgtcatcccccccaggcgagcaagcaaaactgtcgcagccgaagccatcctgcgcgcccgcaattggctcaacatgcaggtcggcgcagagcgctgcaccggcgatcgcgcacgcatcactcccgcctggttctggctttgcacgtttgaggtcttctactacaccggcatccggttgaacgcgctgctgtgcatccgcaagcgcgacatcgactgggataatcaactgatcctcatccgcggcgagacagagaaaactcataaagagttcgtagtgccaataacggaggggcttgtgcctcacctatcgcggctcctgaaggaggccgataaagccggattcgccgatgacgaccagttgttcaacgtcaaccggttctcaccgcactacaagagcaagatgatgaactccgaccaggtcgaagccatgtaccggaagttgaccgagaaggttggggtgcggatgaccccgcaccgtttccggcacaccctggccaccgacttgatgaaggcacccgagcggaacatccatctcacgaagtgcctgctcaaccactcgaatatccagaccaccatgagctacatcgaggccgactacgaccacatgcgtgccgtgctgcatgccagaagcctggcccaaggagcgctggagaacgtcaggaaggtggattacagcggctccccgcaagcctctgccaaaccgaagccatgcgggcaacctctcgctcgaatgggtgaagtaccgccgccggaggccaggacagaacctgcagaaccaagggagcacataccagggacaggcattcagggaggtccaaccgtgcgggaagaagcgctaccacagccacctgacaccttcgaccaaagcgtgctgttcactctgatggctcaacacttatcgaaccgtgccgcctcggcatccgcggctcccgctgcaacaagcggatctggtggatggggatctactgcccgaagcagtctcgcctagcgataccgatactgaagggccggctaccggacgaaaggtagccgcgcctcccagcagttcgctaggcctgtaagaaaaatctggaattaccgagagcgcctggattccagcgccggcatgctggcagagccccgcagtttcacggccaaaaccgcagtaccctctgtaatcgctgattacgtcgggggcgcattgctacgcctgcagaatggtttcagggccttagaaacagaaaagcccacctaaataggcgggctattccatattgacatcacgtcaatgcgggcctaatgttcggcccagacggctgctggacaagtaaaaggtgcaacaccccttcctaggcctatgcaactcgccccgtcgaaaatggtgggtcgtgtaggattcgaacctacgaccaattggttaaaagccaactgctctaccgactgagctaacgacccaacgcgaggcgtataatactgatttctaacgtaaaaacaacacccctcgtgaatttttttcagaaatatggcgtcgggtcggaaataccagccgccgcgaagccatccgcacgcagccggcagctatcgcatttgccgcacgcacgcccctgctcatcggcttgataacaggacaccgtcaggccgtaatccaccccacgcgccacgcccgcctggatgatctgcgccttggacagatactgcagcggcgcctggatgcggaagccattgccttccacgcccgccttggttgccagattcgccatgcgttcgaaagcctcgacgaactcagggcgacaatccggataaccagagtaatccaccgcattcacaccgatgaagatgtcacgggcatccaggacctcggcccagcccagggcgagcgagaggaacaccgtattgcgcgccggcacgtaagtcaccggtataccttcgctaggcgactcgggcaccgcgatgctctcgtcggtcaatgccgagccgcccatgccattgaggtcgagccctatcaccttgtgctcgatcacgcccaactgccgggccacgcgctcggcggcctgcagctcggcgcgatggcgctggccgtagtcgaaactcatggtgtagcaggcgtagccgtcggccttggccatggcgacaacggtggcggagtcgaggccgccggagagcaggatgaccgctttcttctggttcatgatgaattcctcgtctcaatggcccggttcgtcgttccagagaatcttgtgcagttgcaattgcaggcggaccggcaggttgtcggccacgatccaatcggccagttctcgcgcgctgacctgatggtggctcggcgagaacaggacttcaccggcacgctggtcgaggcggtactcgatcagcttggataccgcccagtcgtagtcctctcgcgaacagacgacgaacttcacctgatcgttgtcggtcagcaacgggatattttcgtatcggttgcgtccgacctcgccagatcccggcgtcttgaggtcgagaaccttgcttacgcgcgggtcgacccgtgacacgtcgagagccccgctggtttccagggaaacctcgtagccggcgtcgcagagccgttccagcagagagatgcaattcggctgggccagcggctccccgccggtcacgcagatgtagcggggcttgtaggcggcaacccgctcgaaaatggcgtccaggctaacgacgtcgccgccgctgaaggcataggcggtatcgcaatagtgacagcgcaaggggcagccggtcaggcgcacgaagaccgtcggcaagccggcggtacgtgtttccccctgcaacgagtagaaaatctcggtgatgcgcagggtctgttgcatattcagccacgggcgtgacgactgaacaggtcgtccgcctccgttgcggtaaatgaaggaacgccacgggacgtatcctgtcgtggcgctcgaaatcccggaaggtctcgcgtggagaggcacgaagatcagccgagctgaaaccatgcagcttcacgggggcgccgattctaacgaaaaaacccgcgacaggcgcgggtttgttcatcgggaacgggatcagcgaaggttcttgagatcgcgctgcgccagttgagcggccgaagtgcctgggtactgggaaatgacctgctggaggatacccttggccttgtcgttgttacccaggcgacgctcgacgtccgccagcttgtacagagagtcgggcaccttctggctgctggggtagctctggctgacccgcgcgaaggcctggccggcaccttgcaggtcgcccttggccaggttcacctcgccgagccagtactgggcgttgccggagtactggctgttcgggtacttgcgcaagaaggcattgaacgcctggctcgccttgtcgaaatccttgctctttatcaggtcgaaggccgcatcgtagtagagcttctccttcgccgggtcgcccggctcgctgctcggcgccggtgcgttgttgcctgcgggagccgcaggcgccccattggcgttgatggcgccagcgggtgcggaattctgtgcagcgggagcgccaccaccggaaatccgacggtcgaggtcctggtagcgttccaggctttcctgcttgagctgctggatctggttctgctgctcctcgagcgtgccacgcaggcgagccaactcgtcctgcatctgctggagctgcatgaacagttcgccctgcacggaggtgggggttgtcaccccacctccggcaaaggcgccgccggcacctgccgtgccatacccggaaggaggaacgttgccgccattgttggcggcaacgccgtcatacacaggaacttccgcccaggccgctaatggcaggctgagcgcgaggaacgtcaggacacgcaggtgcttgggcataacgacttcttacttcttcagctcgacgcgacggttctgagcccaggactgctcgtcgtggccggtagcgaccggacgctctttaccataggaaaccagttccagctgggccggcgaaacaccctgcagcaccaggtagcgctgaacggccttggcacgacgctcgcccagagccatgttgtactcgcgggtgccgcgttcgtcggtgtggccttccagcactacgcgctgaccgctgcctttcaggtctttcgcgtgtacgtccagagcgcgcatggcttccggcttcaggtcggagctgtcgtactcgaagtagaaggtggtgatcgcacgcagagcggcttcgtcgctcaggctgccgtcaacggcaccgctgttggcgccatagcctgcgttcgggtcgacgccgccattggcaccttcaccggaagcatcgccgcccttggaggagcaacccacagccacagccatggccagagccagcgcagcaaatttgccgaatttcagcatttccatcatgtaactcctaatgaaccccagtgtataagtttgtaaccgttggcgaccgtcagttcaggtaaggggaccaggaaggctcgcgcacatcgccctgagcggtagggagaggtatccgtacgcgtccgttgatggatacgagcatcagcacgccccggtcctgctggcgggtggcgtagattagcatggtgccattgggcgcaacagtgggcgaatcgtccagagtggtgttcgacagcacccgcagattgccgcgctggaggtcctgggcggcgatctggaagttggtgtagccctgctggcggtggaccattaccagggtcttctcgtcggccgagagtttcgggttggcgttgtagttgccgatgaaggttacccggtccacggcaccgctgttcacgttcattttgtagatctgcggcttgccgccacggtccgaggtgaagtacagggtagagccgtccttgccccagaagggttcggtatcgatcgccaggttgttggtcaggcggcgcagggcgcggctgccaaggtccatgacgtagatttccgggttgccgtcgcgcgacaggacgaaggccaggcggttgccgtcaggggagaatgccggagcgccattcaggccctcgaaattggtgatctgctcacgacggccagtatcgacgtactggatgaagatacgcgggcgcttctgttcgaaggagacataggcgatacggcggccatcgggcgagaagcgcggcgacacgatgggctcgcgcgactgcagcagggtcaccgggcgggcgccgtcgtagtcggagcgctgcaaggtgtagcgggtgttgtcgaccgagaaacgctcggcggtgacatagagcatcttggtggagaacgcgcccttgataccggtgagcttctcgaacgactggtcggcgatgtagtgcgacatgtcgcggagctgatcggtgctgccggtcacgctgccggtcaggacctgctgctcggtgccgacatcgaacaatgcgtactgcacctgcaggcgtccgccggcaggcacgatgttgccgaccatcacgtagttgacgccaactgccttccagtcacggaagatcacttcgctggcctgcgccggctggctgatcatgttctgccggggcagcggctcgaagtagccggagttgcgcaggtcgttgccgatgatattggacatgtcttccggcaacacgttgcccccctggaagccgaacggcaccacggcgatgggaatggcacggtcgttaccgctggagatcaccagcgggtcggcagcctgcgcagcacctgccaccagggccagggcgaacagcgcaatgcgaatcagggtactcacagactcaaatcctccggtttaaagatgatgcggcgctgacgatacaggctgtcgaaggtagcccgcggcaattgctgcatctcgggaatacggccgacgttgcgcaccgccgccaccgccgaactgtcgaaaggcttgtcgccactcgaacggctgacgctggcattggtgatggtaccgtccggcagcatttcgatcagtacttctacgctcattccattacgcgccgatggaggacgccgccactgctggctcaccaggttgacgatcaggtcgtcgagactgccggtgacctcgctgcccacctcgtcggccagggcctgctggcgctcggtcgtatccgaaagcaactcggccaatgcctgcgccttcttgtcctcggcagccttgcgggctgccgcggcagcggcggcggcctttttcttggcggcctcgacggcggctttcttcttcgccgcttccgcagcagccttcttcttggcctcctcggccgctttcttcttcgcgtcctcggctgcctttttcttggcgtcctcagcggcctttttcttggcctcgtcctcggcgcgcttcttggctatgtcagcctgcttcttctgttcggcggccttggcctcggcagctttcttggcttcatcggcctttttcgcctcggcggctttctgggcctcggcctttcgagcctcgtcagccttcttttgttccgccgctttcgcagcagcgacctgctgctgttccagcttttgttgctcgagtttctgctgctcgagcttcttctgttcgagctgctcgacttcgtattgcttggaagcggtcttcttcgcctcgccagcgatcttctggttggtctgtgtcgtcgcctggctcttcgacttgagctggtagagcgtggcctgcacgatcggcttggagggaggaagctccggagcaaacgcccagctgacgaacagcatggcgaagatcagaacgtgcaggaccaccgccaggacgacgggccagaaataactctcggaaggcgagcgctcgaactgttgcttcaagatcagggggcctcggtaatcaacccgacgttgggcacaccggcctgctgcaaggcacccatggcgccaaccaccgcaccatagttcaccgccttgtcgccgcggatgaatacctgggtgtccggacgggcactcatgatcttggtgactgcatcggtcatctgttccaacgacacggcactatcggtctgtttttcagtatccacttcgctgccgacgttccagtaataggaaccgtcggccttcaccgaaagggtcaggacctgcttgttgttgtcctgaggcaacgcctcgctggacaccttcggcaggtcgaccttgaccccctggttgagcatcggtgcggtcaccatgaaaatcaccagcagtaccagcatcacgtcgatgtaaggcaccacgttcatttccgcgaccggcttgcgcttgtgacgaacccttgccatatcggcttacctctcagtcgtcttagtcgtcgctggtgtgcaccttgcggtgcaggatggcctggaactcgtcggcgaaggtgtagtaacgaccgatcagcatctcagaacgtgcggagaagcggttgtaggcgatgaccgccgggatcgcggcgaacaggccgatggcggtagcgatcagcgcttcggcgatacccggggcgacggtggccagggttgcctgctgcacggtggccaggccacggaaggagttcatgataccccagacggtaccgaacaggccgacgtacgggctggtggaaccgacggttgccaggaatggcaggctggcttcgagtttctcctcctcacgggagatggccacacgcatggcgcgcgccacgccctccatcaccgcatcgggatcgacgccgggctgctggcgcagacgggaaaactccttgaagccggcacggaagatctgctcgacgccggagtccgggtccggattgctaccggcctggcggtacagcttggacaggtcgatgcccgaccagaagcgttcttcgaaagcatccagtgccttcttggcggcgcgcatggcattgccgcgctggaaaatcatgatccaggatgtgaccgaggcggccacgagggtcagcatgaccagctgcaccacgatactggcgttgctgatcaggctccacatggaggtatggtcgacgacgttcggttccactttaatctcctgctgaaaaagaatccgggcttccggcaaaagccgcacgcaacgtttcggggatagcacgtggcttcagggtgtccgctcgcacgcacgccaccaggaaccgcccctcgcagagcaggacggagtccgacgctcgacgaacctgttgacgaaacttcaggctcgcccggttcaactcctcgacctcggcgctgacaagcagttcatcatcgagcttggccggggcgtggtaacgcgcctcggcggagtgcacgacgaacagcagattgtcgccgaccagttgcgattgggcgaaccccaaagctcgcagccgctcggtccgagcccgttccatgaacttgagatagttgacgtaatagacgatgccgccggcatccgtgtcctcgtaatagacccggaaacgctgctggaacggctttcccccgtgttgcgcgcgcatactctagaaccaagtcccggctttgccaatcggcaatcgcccacaaatgcaattaattaccatcttcagacgtgaacagatccgtcgtcacccccggccccaaccttttcggaatattcaggccaaagtgcaggtacgcatggcgtgttaccacgcgcccccgcggtgtccgcatgatgtagccctgctggatcagatagggctccagtacatcttcgatcgtgtgccgctcctcgctcaacgccgcagccaagttgtcgattcctacaggcccgccatcgaacttgtcgatcatggtcagcaacagacgacggtcgaggtggtcgaagccacgctcgtcgacatcgagcaggttcaatgccttgtcggcgatcacccgggtaatgtcgccctgcccccggacctcggcgaagtcgcgtacccggcgcagcaggcgattggcgattcgcggcgtaccgcgggcgcgcttggcgatttccgccgcgccctgcggctcgatctccaggccgagaatgccggccgaccgactgacgatggtcgccaggtcctcgacgttgtagaactccaggcgctggacgataccgaagcgatcgcgcagtggattggtcagcatgccggcacgggtggtcgcgccgaccagggtgaacggcggcaggtccagcttgatggagcgggccgcgggcccttcgccgatcatgatgtccagctggaaatcttccatggccggatacagcacttcttcgacgatgggcgaaagacggtggatctcgtcgacgaacaggacgtcgccggcctccaggttagtcagcaacgcggcgagatcgccgggacgctcgagcaccggcccggaagtactcttgatggaaacgcccatttcctgggcgatgatattcgccagggtcgtcttgcccagccccggcggaccgaagatcagcgtatggtcgagcgcctcctggcggccgcgcgcggcatggatgaacagctccatctgctcgcgcacgctgggctggccgatgtagtcggccagcttcagcgggcgaatggcgcggtccagctgctcatcgcgttcgcgaccggaaacggcggatatgaggcgatcaggctcgatcatcgggcgccacctagaccatgcccttcagggcctggcggatcatttcttcgctggacaaatcctctcccggtacggctgcgacggcacgactggcttcctgtggcttgaagccgagggcgatcagcgcgctgactgcatcggcctcggcgcttgagactgtagcgctggcacggggttccatcaccaacggtgcaatcgtgggcatgttttcccaagccttgaagcggtccttcaactccaccagcaggcgctcggcggtcttcttgccaacaccggggatcttcaccagggtggaggtgtcctgtgcctggacgcaacgcaccagttcgtccacttccaggcccgacatcagcgccagggccagtttcggacccacgccgttgagccggatcagctcacggaacagctctcgctcgcgcttttcggcgaagccatagagcaagtgcgcatcctcacgcacaaccagatgggtatgcaaggtcaccggctcgcccaccgaaggcaaccgatagagagtcgtcatcggcacttccacttcatagccgacgccattcacatcgaggatcaggtgtggcggctgtttctccgccagggtgccacgcaagcgtccgatcacgaagagctttccttattcaaagacgcaggcgcccgccacgtcggcgtgcgcccaccaggccatgggggaccagactctgttgggtatgggcatgacacagggcgatggccagggcgtcggaagcatctatctgcggtttctgggtcagcttcaacagatgcatgaccatcatctgcacctgctgcttgtctgcaccgccggtccccacgactgcctgcttgacctgcgaggcggtgtactccgccacgctcaacccctcctccattgccgcgacgatggccgccccccgcgcctgccccagcttcagggccgaatcggcgttgcgcgccatgaacacctgctcgatgctcagggccgtcgggccatgggtgcggatcacctcgcggacgctgcgaaacaccacgtgtagacgctcgtgcaaggggccattaccggtccgtatacatccggacgccacgtattcgcaaccgcgcgccgtttcccgcaccacgccgaagccggtgatgcgcgagcccgggtcaatccctagaatcaaagtcataagctggatactaaaagccggaagcggggttcgaacgcatcaagcgtaccccacttccggcttcgcgttatcgctccgatcggctcagccgagctgcgccatcacgtcgtccgggatatcggcattggaatagacgttctgcacgtcgtccaggtcctcgagcatgtcgatcagcttgagcaccttctgcgcggtttccaggtccagggtcgcggtggtcgaagggatcatggtgacttcggcttcgtcgcccttgaatccggcggcggccagcgcctcgttcaccgaaatgaagtcggcgaaggtggtgaacacgtcgatggagccatcgtcgttgactaccacgtcatcggcgccagcctccagggccgcgtccatcagcgcttcctcgtccacgccgggagcgaagctgatctgtcccttgcgctcgaacatgtaggcgaccgaaccatcggtgcccaggttgccgccacacttgctgaaggcatgacgcacttcggcagcggtacggttgcggttgtcggtcatcgcctcgacgatgatcgctacgccgctcggcgcataaccttcataggaaagctcgaccatgttgtcggcatcgttggagccgacgccgcgcgcaatggcacgatcgatggtatcgcgggtcatgttggcggtcagcgccttgtccacggccaggcgcagacgcgggttgtccgccgggacgccgccgccctgccttgcagcgacggtcagctcacggatcagcttggtgaagatcttgcctttcttggcatcttgccgctctttgcggtgcttgatgttggcccatttagaatgaccagccataactcactccgtattgctctctcggcaggaggcgccgcaagcggcgcctccgcgggttgattcgaatcactcggccttcggctgctcgcgcaggcgaatgtgcagctcgcgcagggccttgccgtccacggaacccggtgcctgggtcatgacgtcgccagcgctctgggtcttcgggaaggcgatcacttcgcggatagacgatgcaccggtcatcagcatgaccaggcgatccaggccgaaggccaggccgccatgcggcggcgcaccgtacttgagcgcgtcgagcaggaagccgaatttctcttcctgttccgcctcgtcgatgcccagcacacggaacaccgcctgctgcatggacttgtcatggatacggatggaaccgccacccagctcggtaccgttgagcaccatgtcgtaggcgcgggaaagtgccgcgcccggattggcctcaagctcggccggggtgcacttgggcgaggtgaacgggtggtgcagcgcggacagcgagccgtcgtcgttctcctcgaacatcgggaagtccacgacccacatgggcgcccactcccgggtgagcagcttgaggtcatggccgaccttgatacgcagcgcgcccagggcatcgcaaacaatcttggccttgtcggcgccaaagaacacgatgtcgccgtcgaccgcgccaacgcgatcgaggatcacgttcaggttggcctcggggatgaacttcacgatcggcgactgcagaccttccacgcccttggcgcgctcgttgaccttgatgtaggccaggcccttggcaccatagatgccgacgaacttggtgtagtcgtcgatctggctgcgcggcatggaggcggcgcccggtacacgcagggcggcgacacgccccttcggatcgttggccggaccggagaagaccttgaactccacttccttcaactggtcggcgacgtccaccaactccagcgggatgcgcaggtcgggcttgtccgaaccgtagcggcgcatggcctcttcgaacggcatgtgcgggaactcgtcgaactcgacatccagcacttccttgaacagctggcgcaccatcttctcggtgatgccgatgatgtcgctctcgtcgaggaagctggtctcgatgtcgatctgggtgaattccggctggcggtcggcacgcaggtcctcgtcacggaagcacttggcgatctggtagtagcgatcgaagccggcgaccatcagcaattgcttgaacagctgtggcgactgcggcagggcgaagaagtggcccgggtaggtacggctcggcaccaggtaatcgcgcgcgccttccggcgtcggccggccgaggatcggggtctcgacgtcgaggaagccgttgtcgtccaggtagcggcgaatgctgctggtgatgcgcgcgcgcagcttcagcttggcggccatctccggacgacgcaggtcgatgaagcggtagcgcaggcgcgtttcctcgcccacatcggaatattcatccaacgggaacggcggagtctcggcctggttcagcacttccagttcgtagcccagtacctcgatggagccagacgccatgttcgggttgcgcgcgccttcagggcgcaggcgcaccttgccggtgatcttcaccacgaactcgctgcgcacccggtcggccttggcgaaggtttccgcacggtccggatcgaacaccacctgggccagcccctcgcgatcgcgcacatcgaggaagatcactccaccatggtcgcggcggcggtgaacccaaccgcaaagggtgacttcctggccgtccaggctctcgttcagttggccgcaatagtggctgcgcatcatggtgtggttcgcttctcgtaagtcttggattctgtggagccgccggctgcctggcgaccattgccgggctctcgccggccctgaccgagcaccggaaccatcggtacgcccccggaaggacatctcccgcgctgcccggtgaacggcaacggcgaagcacccgcatccgggcccacttcgcattgaaggcggggattatagcctgaaaaatccatggcttgcagccagccccgccggcctgtcacgcgggaagccaggccgttgaacggaagcatttcgcctccccctgcgaaccattcgcttgaccgggcagtcggaatagattctccctatcgccgcctttgacatagaccaagagcgctgggaaaaaccctgtgttagcctcactccaactgtttcggagtgccccattcacaaggccgactgaaaggagaacgccatggaaatcaatatcggaatcggcgaacaggatcgcgcagccattgccgagggcctgtcgcggctactggccgacacctacaccctctacctgaaaacccacaacttccactggaacgtcaccggcccgatgttcaacacgctgcacctgatgttcgaaggccagtacactgaactggccgttgccgtggacgacatcgccgagcgcatccgggccctgggcttcccggcgcccggcacctacgccgcctacgcccgcctctcgtccatcaaggaggaggaaggcgttccggaagccgaggagatgatccggcaactggtccagggtcaggaagccgtggtgcgcaccgcccgcagcatcttcccgctgctggacaaggtcagcgacgaacccaccgccgacctgctcactcaacgtatgcaggtgcatgaaaagaccgcctggatgttgcgcagccttcttgccagctgatcgtcgatcgctcgatagaaagcggggcccgcctcagggtcccgccctccccccccctccggcgccaaccgcttgatttgagtagcctcctgctttcctgttaaatagccgccgtgcgtcacgcgcataggccggccgtccttccgcacctttcgtttcatgcaccgaagcgctgtccggctacttgatcgttaccccatcaaggtgaactcattgacatgttgaaaatcgtccttctggtcacgggcgtcgccgccctattgctgtccttcattcccagcctaagaaccgaagccacacccttcctgcaacatcccgatgccatctacctggccattctgggcctgatcaacctgctcttcgctcccgtactgcaatcgtcacatccaacccgcccgctgcaggccggcgcagccgccctgctggtcctgggcgtcgtcctgcaggcactgatcctgctggcgccgctgccgaccatcgccgaccagccggcgatcgtcctgcccctgctaagcctggtgctggccacggccctgcaactggcgggcagcctgaagcccggcaaaccggtctcgcgcagcgccagcgccccggcggccctcggcggcagccaggacagcggcaaccgggagaccggtaccgtgaagtggttcaacacctcaaaaggtttcggcttcatttcccgcgattcgggcgaggacatcttcgtccacttccgagcgattcgcggcgaaggccaccgcatcctcatcgaaggccagcgcgtggagttctcggtggtacaacgggacaagggcctgcaggcggaagacgtaatcgcctcccgccgctgaccgccgcgaaaaacagaaaacccgccgaacggcgggttttttgtgcattcaataatggggaggaggcgcttcgtcttcccccgcctcgcccaccagcccctggacgtcttccagacgcttgatcaatgccgcgacctgaagctgcagtcgctcgatgctgcgctgctgctcgaccaccacatcgttgagagcctgcaaagtgtcatcctggaaagcctggcggcattccaggtcatccatgcgcgcgtccagctccatctaggcctccccggcaaaacggaagccgtcggtcagcaccatccgcaacttgccgcggatcgcctcgacctgctcggaagaataaggctgagccggatggcgcccccagacagggcctggccaggcgtcgtcgccacgtcgccggacgatcacgtgcatgtggagctgactgaccacattgcccaggttagcgacattcatcttgtccgcacggaaggtgtccttgagcacctctgccagcagcgtggcctcgcgccacagcgcctgctggtcatcgacatcgagctggaacagctcggtgacatcctcccgcctcggcaccaggatgaaccacggatagcgggcatcgttcatcagcagcaggcggctgaggggaaagtcgccgagcaacagggtgtcctgctccagccggggatccaaagcgaacatactgacctctcctgttcgaccgtcattcatggacagcttagcccctccttccgggaaggaacccgccgtaactgccgcgcaggatacttcgccgcccggccaaagcaagcccgcacatccgcccgccccagcttggcgcgcctctccagccgaacgccccataagatgccggtcgaatgaatacagcgcgacgccgaacaggagacatgccgtggatacaaacgcattcgccacagacaactcgatggcaaccaacccttgaagcagacggattacaaacaggtttcaaggcatgattcgtttgctttcaaacagaatagcttcgctctcgaagagaccaaatggaatacataggcgaagccgttttccaatttgtgcacggagtttgcttatacctctttcatcacagtaagaggggccgcacggaacatgacatttttattacaagaccccgccaatcgggaaaagcgacttgagaagcgacctcaacaagagtgaccaagcccgcgacatacgtcattttttcaactgcacacctacgcagatgcgacatacgtcatgcaattttgcgacaactccgtaaagaatccgtcgcttcggaacctcaactatcgccaagaaacactgcgtgctataagttagcgccgacaagaagaactagccgtcactgcggcactgtggtggcagaaataatttcaaaaccaaaggagcaatcacaatgaaagtgatgaagtggagcgccattgcactggcggtttccgcaggtagcactcagttcgccgtggccgacgcattcgtcagcgatcaagccgaagcgaaggggttcatcgaagacagcagcctcgacctgctgctccgcaactactatttcaaccgtgacggcaagagcggcagcggggaccgcgtcgactggacccaaggcttcctcaccacctatgaatccggcttcacccaaggcaccgtcggcttcggcgtcgatgccttcggctacctcggtctgaagctcgacggcacctccgacaagagcggtaccggcaacctgccagtgatgaacgacggcacgccccgtgacgactacagccgcgccggtggcgccgtgaaggtacgcatctccaagaccatgttgaagtggggcgagatgcagccgaccgctccggtcttcgccgccggcggcagccgcctgttcccgcagaccgcgaccggcttccaactgcagagcagcgaactcgaagggctcgatctcgaagcgggccacttcaccgaaggcaagcagggcaccaccaccaagtcgcgcggcgaactctacgcaacctatgcaggcgagaccgccaagagcgccgatttcattgggggccgctacgcaatcaccgataacctcagcgcctccctgtacggtgctgaactcgaagacatctatcgtcagtattacctgaacagcaactacaccatcccactggcatccgaccaatcgctgggctttgatttcaacatctaccgcacaaacgatgaaggcaaggccaaggccggcgacatcagcaacaccacttggtccctggcggcagcctacactctagatgcgcacactttcaccttggcctaccagaaggtccatggcgatcagccgtttgattatatcggcttcggcgagaacggttccggcggcggcggtgactcgattttcctcgccaactccgtgcagtactccgacttcaacggccccggcgagaaatcctggcaggcccgctacgacctgaacctcgcctcctatggcgttcccggcctgactttcatggtccgctatatcaatggcaaggacatcgatggcaccaagatgtctgacaacaacgtcggctataagaactacggctacggcgaggacggcaagcaccacgagaccaacctcgaagccaagtacgtggtccagtccggtccggccaaggacctgtcgttccgcatccgccaggcctggcaccgcgccaacgccgaccaggccgaaggcgaccagaacgagttccgcctgatcgtcgactatccgctgtcgatcctgtaatcgaccgacaggcaacgaaaaaacccggcatcgccgggttttttcttctcggcggcaacgcgcctataaaggaagggcgtaggtaccggtcacatgggccaccaggtcttcctcattactctgcgaaaacactccgacctcgcagacgacctggcgccgccccagcttgaggatgctcgcctcggccaacaggtcctcgggcctgggcttgctgaggaagttgatgttcaggttcgaggtcacggccatctcgaccgccccgagacgcccgagaatgaccgcgtacatcgccgcgtcggccagcgccatgatggtcgggccggacaacgttccaccgggacgcaccagcttgccgtgaaaaggtatgcgcgccagcgcatgtcgttcgtcgagacgctcgacacgaaaatcgatgtcctcggccatgggcagccccatgcggatcaacgcctgtacctgcgccgcgttcattgcctgctgactcctcatcatcgatggccggcgccctgtacgcagccagaccggcaccgtacaatgcccagccattcctcccgatacaaccgacataacggccaaagatgcgtaccagtcagtatctgctttccacgctcaaagaaacccccgccgacgcggtggtaatcagccatcaactgctgcttcgcgccggcatgatccgccgcctggcctcgggtctctacacctggctgccaatgggcctgcgggtactgcgcaaggtcgagaccatcgtccgcgaggaaatgaacgctgccggcgccctggaagtgctgatgccggcggtgcagccggccgagctgtggcaggagtcggggcgctgggagcaatacggccctgagctgctgcgcctgaaggaccgccacgagcgcgaattctgcgtaggcccgacccacgaagaagtgatcaccgacctcgcgcgcaacgagctgaacagctacaagcaactgccgatcaacttctatcagatccagaccaagttccgcgatgagatccgcccgcgcttcggcctgatgcgcggacgcgaattcatcatgaaggacgcctattccttccacctgagccaggactcgctgcagcagacctacgacgggatgtaccaggcgtacagcaagatcttctcccgcctcggcctggatttccgtcccgtgcaagccgacaacggctccatcggcggcagcggctcccatgagttccacgtgctggccaactccggcgaggacgatatcgtcttcagcgacagctccgactacgccgcgaacatcgagaaggccgaagccgtgccgcgcgagagcgcccgcggcagcgccaccgaggacatgcgcctggtcgacacgcccaacaccaagaccatcgcggccctggtggacggcttccagctaccgatcgagaaaaccatcaagaccctggtggtgcatggcgccgaagaaggcaccctggtcgccctgatcgtccgcggtgatcacgagctcaacgaaatcaaggccgccaaccagccgctggtcgccagcccgctggtattcgcttcggaggccgagatccgtgccgccatcggtgccggccccggctcgctgggcccggtcaacctgccgatcgcctgcatcgtcgaccgctccgtcgccctgatgagcgatttcgccgctggcgccaacatcgaggacaagcactacttcggcgtgaactgggagcgcgacctgccgctgcccgaggtcgccgacctgcgcaatgtcgtcgaaggcgaccccagcccggacggcaagggcaccctggtgatcaagcgcggcatcgaggtcggtcatatcttccagcttggcaccaagtacagcgaagcgatgaagctgagcgtcctgagcgaacagggcaagccggtcaacctgatcatgggctgctacggcatcggcgtatcccgcgtggtcgccgccgccatcgagcagaaccatgacgagcgcggcattctctggccaagcgcactggcgccgttccagatcgccctggtaccgctgaagtacgaaaccgagagcgtcaagcaggcgaccgacaagctctatgccgagctgaccgcagccggtttcgaagtgctgctggacgatcgcgacaagaagaccagccccggggtgaagttcgccgacatggagctgatcggcattccccaccgcatcgtgatcagcgaccgcggcctcagcgaaggcgtcctggattacaagggccgccgcgacagcgagtcgcagaacctgccgatcggcgaactgatgtcgttcatcaccgaaaaactcagccgctgagcgtaacgatgcccaccggaagacccctgcgcctattcgccgccgccctgtgcggcggccttctgctgagcggctgcgccaaccagttgccgcagcgtagcgagcatgaggagcgcgtcgagcggaagctgctcgaacacaccctgcaagtcgatgtcggccagcccgatgtgctcgaactgccgcagcgccgggtccggatcaacgaccagaagtccttcgaggtcaccgagttcgaggtgacgcgccgttacgaccgctatacgccgtaccaggcctggcgggagatctacgagatcccgttgggcgcggtggcgctggtggccggcgtcggagcgaacatcgtcaacgtggtgaccttcggcagcgtaccggacaacatcacccacggctggatcaactacggactggccggggtgaatccgttcatgaacgtggaatccaacggtcgcgccgaacagaatctcgcgagcatcgacgagaaacagcgcgacaagcgcctggaatactccagcctgccctgggcggagcgtccggtcctggtcagttccggcaaggaactcaacgaactgcttaccgaccgtcatggcgtgctgcgcctcaacctgctcgacagccccttcgccgaacaggacatcagccgcatctcgcagatacacctttcggtgagcgacccacaggatggtacccgcgccgatgccagcctccgcgtcagccgcagcctgcgcggcaagctcctggaagctcacgccctgatctatgacgacctggaaggcgatgacgtccaccactgggtccatcgggtgaaacgcctcgcggagctgggcctggaagaagaagccagcgaactggaacagagcctgatcgagctcacgcgcaacgaccccgaactgcagcagcagttcatgcatgccctgctccgggatgccggtcgcctggccgcggaccctggcgagacgccctgacggcgaactcgcctcgtcagcgacggacgacaaagccagcgatcccctgcagcggcatttgctcgacctcgaccgcagagacctccgcgtgccgcgggccccgccccagccatcgctccagggctttcgcccggtcctcctcgccctcccagacgacttcgacacgcccgtcatccaggtttcgcacccaaccgtcgagttcgaggcgatcagcctcttcccgggtcgcctgacggaaaccgacgccctgtacccggccgccgacataggcatgcaagcagatcctcgccatcagcgtccctcccgcaaagcctcgagctgtttcaatatgccatcggccgtctgctcgcccagcagacgctgacgcatttccccccgagcatcgacgatataggtgacgggcaacgcttcgctgcgagggagcttgaagcgaggcgccggatcatcggccagcacggtgaagcgaatccccatgccatcggccgacttcttcaactcggcatcgcgcaggccatcgaaattcacgccaatgacgcgcccgccctgcccttccagcacctgcgcaaggcgattcatctccggaatctcggtccggcagggcgcgcaccagtcagcccagtaattgaccaccagccaatgcccgtccaactgctccgcagcgacaggacgcccgtcctggtcgactccgtaatccgccgaacagcccgcgagaaacaacaccgcagcagcgcccagcgggcgtagccaactccccatgtcaggaacctctcgagtcaggaaaacttcggccggaccagggcaacccggcgcggcactatggcgagaccttactggaagccatccacctctgcaaaaccgagtggagacgaatatgggaagaagaagccccgatacttcctacaaggcacaaagtgcgagaagagtcacgacgatcgccgtcgaaccgcacagtttgacgcaaaggaccacccctataatccgcgtgccacacacgacacgacgactcaaccggccgtatgctcaggcatcggcaggatcgacttggggagaagtcgagagcgacgagtccgaagcccttttaaacggacacactgctgcttatgaaagaccatctgatcggaagcgtccccgcacacctggtggatgccgcacgcccgaccctgacagcccacgagggcctggtcgcggactacaacattgccgcctggctacatcttccggatgcctgcgacctgctggtgtcactggtggtcagctatctggatggcgggcgccagcgcgaagtggcggtggatcacggacgaatcgaccgccagcaacgcatcctgctttccggcattgcccgcctgcccgtacggcagaaagtggagaacatgcaggtacgcctgaagtcggcgacggccttttcccgactggtcgtggaggagttcttcgtacaagcggtggagcaggaaaacaggtcccagcaggtgtccgaagcttgagccggatcgctcagccctggcgcacctgatcgagcaggggttcgtcccgcgctttctcaggcgacggttcgctgacgctgcgcgccggcaccagcgactccggccaactgctgaactgcagcccggtaatccggttcaaacgctcaagcgctgcctgctcatccttgtgatgcaaatggacgaccttgttcgacattgggagcatgaacgggaacctcggcggaactacggagtgaaacgactgtcacacgagggtttgccagaagcgtgccaacagcgctttccctgcgcttgctggggttcctccggcagcatgcagcgcctcatgcacatcgttcgccgcaaactgacactttacgtcaccttcgctcccgaggttccgtccgccagccagtgggccaggctttctccgaacagcgcctcctgctccacctgcaagcgctccatggcctgctggaacggcggataccacgcctcgtccagattcgcaggcatgcgctctcggctaggcatgggccaggggcagcgattcagcaagcgatgcagactgtaggcgccaagatcccggcacagcacccactcgcctccgccggcgcgacagacgaactgctccttctcgagaaagtccagcagttcctcccactcatcctcgggcaacagccaacccgcacgatgcaagtgggtcaggcgcagcgactgtccaagctgctggcgctggtggaacaccctcagcacgccgagcaggacgatcagcttgggcagcgagcgccgccgccagagacgggaagaagagagattgcagaccagcaccgcgccgaacagaacgatcatccaggaaagatagatccacagcaggaagataggcacggtggcgaaggcaccgtagatcaactggtagccgggaaacaggcttacgtacagcccgaacagggttttcgcggcttcgaacagtaccgcggtgaacacgccgcccatcagggcatggcgcaccgggacccgggcgttcgggaccgccgaatagagcagggtgaaggccgccacgctgaacgccagcggcatcagccccagcagtgtttccgcgcccggcaacgcgtccgggccatggagcagcgacagcgaagtgatgtaggtggtcacggcgaagccggcccccagcaacaatgggcccaggctgaggatcgcccagtagaggaggaaccgcccgacaccgcggcgtggctggcgaacccgccagatctcgttgaaggctttctcgatggtcaccagcatggtgaaggcggtgactgccagaaagaccaccccgacccaggtcaggtgccgggcctgggtggtgaaactcttcaggtaggtttccaccgcttctccagcggaaggcacgaaattgcgaaagatgaaagtctggatcgactcgcccatgccatggaatgccggaatcagcgaaagcatggaaaacatcaccgtcatcatcggcactaccgcgaacaacgtggtgtaggtcagcgccgccgcgctgttgggagccttgtcggtgacgaagcgatgagcgaggaagcgagcgaactcgaccccatcgttgaaatgttcgcgcatgccctctccttgaagtcgcgccggttcttcgcctctcggggcggtacttcgcgccgacgggttcagtcctggtcgacgaggcggttagaatagccgtcacttcaccggccatgcgacccctgacatgagcgaactgatcctgttgcacaatccgcgctgctcgaaatcccgcgcagcgctcgaactgctcgaagcccgcggcctgcaaccgcaggtggtgcgctatctggaaaccccgccgagcgccgccgagctgaaagcgatcctggccaagctcggcattcccgcccgccagttgctgcggaccggggaggacgaatacaaggccctcggcctggatgagcccagtcttggcgaagaggccatcatcgaggcaatggccaggcatccgaagctgatcgagcgcccggtgctggtcgcgggtgacaaggcggtggttggccggcctccggaaagagtcctggagatcctcgcttgagcagtccctacattctggtgctgtactacagtcgccatggcgctaccgcggaaatggcccggcagatcgcccgtggcgtcgaacagggcggcttcgaggcgcgcgtacgcacggttcccgcggtatccaccgaatgcgaagcggtcgccccggacatccccgcggagggggcgctgtacgcaaccctggaggacctgaagaactgcgcgggcctggccctcggcagcccgacccgcttcggtaacatggcttccccgctgaaatacttcctcgacggtaccagtagcctgtggctgaccggcggcctggtcggcaagccggcagcggtcttcacctccaccgccagcctgcacggcggccaggagaccactcagttatcgatgctattgccattgctgcaccacggcatgctggtcctgggcattccctacagcgaacccgccctgctggaaacccgtggcggcggcacgccttacggcgccagccacttcgccggcgccgatggcaagcgcagcctcgatgagcacgaactgaccctgtgtcgcgcgctgggcaaacgcctggcggaaaccgccggcaagctggggagttgaaatggcccgcaagaacaaaccgctgcccgaagtagtgtggctgcagccgcgcctggcgctcagccgcgccatcagcctgggaagcttcgtcggcctggttctgctcatcctcattcgcgacctgatctacgcggacgcccatggtgcggcgagctgggtgccctggctggtcctcgccttcaagctgctgccgctgctggtggtggcccccggactgctcatgggcagcgcgcgcgggcatgcctgggcctgctacgtggtcaacctgtatttcatcctcggcgtactcgccgccttcgatcccacgcagcgcctgttcggctgggccgaagtgctactcagcgtgaccttgttctgcgccgcgctgctctatacgcgctggcgattccagtacgaccgaagggtcgccggggaacgctgatggtaaggcaggagcccctcctgccctgcctgcgccgctttccagtgccgaccgccggtaagcctgcggacagccagcgctccggtattgccggcgcatggatggagagacggatagaaggcggtcacttcctgccgcaagcgaaacccaaggactgcggcacggccatgcgggagttcgtcgacggactgtcgacgcctaccagccgagggtttccttgaggaaaggaatggtgagcttgcgctgagcctggagcgaagcgcgatccagttgctccagcagatcgaacagagagttcatgctgcgcgaaccgcggttgaggatgaaacgaccgacttcatcggtcagatgcaagccacgacgggatgcccgcagttgcagggcacgaagcttgtcctcgtcggaaagaccgtgcaactggaagatcagcgccatggtgaggcgggacttcaggtccggcagcttgacctgcagctcccggggcgacttcgatgccgccagcagcaggcgccgaccggtatcgcgcagtcgattgaacaggtggaacagcccctcttcccactctcgcttgccaaccagcacatccaggtcgtcgatgcagaccagctcgcactgctcgagatcgtcgaagatttccgggccgtactgcaccagatcggccatcggcaggtagatggttcgctcttcgaactgctcgaaacgcaagcaggccgcctgcaacaggtggctgcggccgacgccgtcgtgtccccagaggtagatgaggctttccgcccagccagcctcggcttcgcacaaacgctcgacatatcccagtgccgcggcattggcaccgggatagtagttggcgaaggtggcgtcgtcgcgcagacgcacactgaggggaagctgaataggtttcatgccaggctgggcggacaatccgaaaacgccgcaggagtcaccgtaaaggctgcaaagtttatacgcctcggcaaggccgcacaatgagcaactaggcaagcaaaatcaaaggtttgccgatagccgaggctccttgcccagagcatcggccggtcgcgcgccggcccgctccgttgcatagaagcggatcggcgcgccgactcactgccagcggaaattcagttgggtcgacgacggcaccgccgcgctgggcgctgcgggctggccggaggcatccagcggtacgctgtcggccgggatttcctgcaactgcgccaggcccatctgggcacgcaattgctcgggactggccttcacggaatagtcgaggcgatcgccccgcacgcctaccagacgcgcgccgaacggatcgagcaggcgttgcaactcggcatagcgtgccagtgtcgcgccctggacctggagggtcaggccggtcgccgctcccggcgtggcaacgaaacgagtggacaggcggttgccgacggccagcatcacgctgtctgccaacgcgtcgggcgtagcgccttcagcttggccttgctctcgcgaatcgcccatccacagccgccattgcgcctgccatttgccgtccgcctccttggcgtccactgccagcaaggcatcggcggcataacgctcagaggctgcgcgcagggcatcgggttgggcggcggtgaggttttccggggtaccgacgatctgttcgtcgagatccgccagaggcaggcgcaacggcaagccgcggttctgcgccgcacgcttgagcggttcggccgaggcctggttgtcaccgaccagggagctgccatcggcgctttcgttcagccaccaggccagcaccgccggccggttggcgccccagctcggcaggccggcggcccgcagcgcattaccggtggcggtcggatcgaaatcgaccaccagcgccagcggcggaccattttcgaaggcgtactggctgatcagttgctgcggatccttcaggtaccccgccaatgccgggttctgcggcgcctgcggattgccggtcaggcgcaccagcagggtctgcagggctcgcaccagtccggcatcgcgctccccgggctgctgcgacgaaaccggctcgtggacctggtagagattggggaccgttgccgcgaagacgggcaagcctagcagggaaaaacagagaacgaagagtcgggctatgcgcatggagggctctcgacgaacggatgggaacggcggcgacgagctgtgaaggccgcgcaagtggacctataccttaaacagcagtccgtccagcggcaaccgagatggccgctgcgtggcaagcctgataaaatcgcgcgccttcaaaaccggcaaacagcgttgcacgcctgggcggccggccgatctccgaattacccctataggcctggatttatgagcagcaagcaaccctcgttgagctacaaggacgctggtgtggacatcgacgccggcgaagccctggtggaacgcatcaaaggcgtggccaagcgcaccgcacgcccggaagtgatgggcggcctcggcggcttcggcgccctctgcgaaatcccggccggctacaagcagccggtgctggtatccggcaccgacggggtgggcaccaagctgcgcctggcgctcaacctgaacaagcacgacagcatcggccaggacctggtggcgatgtgcgtcaacgacctggtggtctgcggcgccgagccgctgttctttctcgactactacgccaccggcaagctcaacgtcgacgtcgccgccaccgtagtcaccggcatcggtgccggttgcgaactggcgggctgttccctggtcggcggcgagaccgccgaaatgcccggcatgtacgaaggcgaagactatgacctggccggcttctgcgtcggcgtcgtggaaaaggccgagatcatcgacggctccagggtccaggccggcgacgcgcttatcgccctgccctcctccggcccgcactccaacggctactccctgatccgcaagatcatcgaggtttccggcgccgacatcgagcaggtccaactcgacggcaagccgctggccgacctgctgatggcgccgacccgcatctacgtcaagccgctgctgcaactgatcaagcagaccggcgcggtcaaggccatggctcacattaccggcggcggcctgctggacaacatcccgcgcgtcctgccggacaacgcccaggccgtgatcgatgtcgccagctggaaccgtccggcggtattcgactggctgcaggaacagggcaacgtcgacgagaccgagatgcatcgcgtactcaactgcggcgtcggcatggtcatctgcgtggcccagagcgacgccgagaaagccctggaagtcctgcgtgccgccggcgagcaaccctggcagatcggtcgcatcgaaacctgcggcgcggacgccgagcgcgtggtcctgaacaatctgaaaaaccactgatgccgaaactctgcaatgtcgtggtgctgatttccggctccggcagcaacctgcaggcgctgatcgacagcctccgggacggcgccacgccggcccggatccgcgcggtgatctccaaccgcgcggacgcctatggcctggaacgcgcacgccaggccggcatccagaccgaggtgctcgatcacaaggcctatgccgatcgcgaaagcttcgacgaggccctggcacaacggatcgatgcccatgaaccgcacctggtgatccttgccgggttcatgcgcatcctcagcgccgatttcgttcgccattaccaggggcgtctgctgaatatccatccctcgttgctgccgcgccacaaagggctgcatacccatcaacgcgccctcgaagccggcgaccgcgagcacggttgcagcgtgcacttcgtgacggaggaactcgatggggggccactggtcgtacaggcagtaatcccggtagagtcgcaagatacgccggaacgcctggccagacgggttcacgaggaagaacaccggatctacccgctggccatgcgctggttcgccgagggccgcttgcgcctgggcgaacagggcgccctgctggatggccaggccctgcctgccaccggccatcagattcgcaccaaggagattcgcaatgcgtaaagccatgctgttcctgctgacgctgctgaccctgccggcctatgccttcgagctgaagccgttcaccgccagctataccgccgactggaaacagatgcccatcagcggcaatgcctcccgcagcctgaaggctctcggcgacggccgctggcaactggacttcgaggcctccatgctgctggccagtctcaacgaagtcagcaccttcaaggtcgagaacgacaccttcctgccacagacctaccgcttcgcccgccaaggtctgggcaaaggcaagcagatcgaactggacttcgactggtcgcagaagcaggtgctcggcagcgaccgcggcgatgcggtgcggcaacccctgaatcgcggtcaactggacaagtccacctatcaactggtcctgcagcatgacgttgccgacggcaagaagagcatgagctaccagatcatcgagggcgaggatgtcgatacctacgacttccgggttctcggcgaggaaaaggtacgcacccaggctggcctgatcaacgcgatcaaggtcgagcgcgtgcgtgatccgggcaagagcaaccgcaagaccatcctctggttcgccaaggactgggactacctgctggtccgcctgtaccagatggaaaccgacggcaaggaataccagatcatgctcaaggaaggcaccatcgacggcaagaccgtcactggcgaaaagagctgatcccccctcccacgaaaagccgggccattgcccggttttttattgcccgcggatcagccgcaggcctggtgctcgcggcagatcagttcggcatcggcatcgttcaacggctccccggttagaccgcagaagggcgagcccgcacgccgttgatggaaccggcaggaccgacaaaggccgaaaccaggcacatcctcctgacgctggatgacgaccagaagatcacgcaacaagccttgcaagtgttcgcccttctcgcccagtgccgtgacggcctgctcgaggaactgcggcggaatcaccgcctcgatcagcgcgcgccccgcatcggtcagccgcagatgaacgctgcgccgatcccgcgcatccggcagcttgctgatcagcccccgcccttccagcaccttgagcgattgcgacactgtgcccttggtcaagccaaggtattcggtcacgcccagcggagtgtccgaatagcgattacaacgcgccaggtaatgcaaggcgctcaactgcaccggctgcagctcagccaccagcggctgctcgcgggaccaggcacgcatcaggctggtcagcctttccagataatcgtaaagggcgatggcggacatgggatacctccttgccaatatagtatcgactaaaaacatgtttgacaaagaggtcgcccttgtttaggctgaaaacgtatcgtatcgatactaaattcctacaggagaatcagcatgaccaaagccatctactaccacgccggctgcgcaatctgtgtcgaagccgaacgttccttgctgccattgctcgatcgcaagcaggtggacatcgaagtggtccatctcgccgaacaatcggcacgcatcgccgaggcggaaaaggccggggtcaagtcggttcctgccctggttgtcgatggacaggtactgcaccttaacttcggtgcggcgctcagcgatctgaaataaggagaacggccatggaggtgaagatcttcgacacccatgtgcgaacccgcgacggccgctacctgcacttcgatgtcctggtcacggaggagctgggggctcgcgccggcgagttcgctcgacgctggctcgccggaagaggcatagacgaggccgatatcagccaggggcattgcagctactgccatagcgagattgcgacagcagaggttgccgaagccattcggctccatggccattacatccttcccctggaaggctgttgaggccaatggacagctaccgcccaatcgcctgcgatctccatgactacctggagatcgcctgcctctaccgctaccggttgctcctcgaactcgaggacggtgttcgcttcgaagccgaggcgcgcacgacgcatacccgggccgttcggccaggcggcggcaaggaggaataccttgaggtggccgtcgaaggagcgactctgctgctgcgcctggatcgcctgttggcgattaccgccctcacagaagcggccttgttcggccgcatacgcctgagggaagaggcctgttccagagcatccggcatgccatcttcacaccttggaaactgaaaaggtttttctcaattccagggctatttgattagcctgctattgaaataggctggatttgccttgatgcagatcaaccctggagcagaaagatgagtgtgacagtgaccgagcgtgacgatgaccacaaatcccgcgagctgcgtgcgcttggccgccgctgctgggacgtgcatcagcagggactgctggttggcgtcttccataacgaggatgacgcccacgcctatcggatcaagctggagaaagaagaagaactgcggcagataggtgaatcggcctgaaccatgcgcccccgcgtacttcgggggcgcacctttggtctcaggtccctgaaaggctccggtcgaggctgacgactcccggcggcaggctatcttcctgtacccgttgccgaggggtacgcaacatcgcccgaaccagagccaccagcacgccgaacaccaacccgcccaggaggccaaaggccaccaccaaggccttgcgcggcttgatcggtttcagaggggtcgaagccttctggtcgatccgcaccagttcgatcttcagctcgctcgccttcagagtcttgaggcgcgcctgctctccacgcagcttgtcgatgttttcgaagaaacgctcctcgccctttcgagcctgcaggtattgcacttcacggttgttctccagctgcttcagctcctgctggatcttcgccacgcggggctcggtgaagtcatcgcccttgcgtttgagcaaggtatcgcgctcggcggtcaaggcatcgacacccatgaaatacaggggtatctgctggttattcacctcggtgcggaaaacgctgcgcgagccatcctgcccgacctctcccagtgcgcccggggtcgtcggcttgacgatccccagccgggtggcgatctggatagcctcgttgagctgctggatacgcgaatcgcgcaccatcttcagccgcccgcgcaacgccttgagctcatcctccaggccggcccgccggatgctgtccgcttccagcaaccgggcgatcttgccctccttggtagcctggtaactggcacgcttgccttcgatatcctgctcgaggaattgcaggcgaccgtcgatacgtgcctggaggtcgtccaggattcgctggcgctcgttctcgatggtcgacgcgagcatgccgttgagaatggcggcaccatccatgccctggggatactgcatggacaagcggaagaaaggcgccgcctgggggtccttcttcaagtccgcctgctgcatgctgaaggcatcctggttgaacttccagaaagcctgctcgggggacaggccctcggcgttcaattgctggaatagctctggatgggcttcgaaatactccagcctgccggagtaggctgccagctcgttgccgacgcgatccagcgcttcccgcggagtcagggcatacagcccgttgacattgacagcctccagggccttggtctggattggccgcaacaggacatccacctggtaggttggaacagccaacagcgcgtaggcgagcgcagcggcggtcgccaaggccgcgatcagcgctatcagccatttcgacgcccacaattgctggaacagctgaacgagatcgatctccgagggcgaagcccccggaagctgtgaggaaggcataccaacgtccttttcgataggcggctagcccacagatgcacgcaaaggcaaccgtaggatatttctgaggaaaggcattatgctatcgaaacgaaatcatcggtagttattttagaactgcttcgcattccagaattggtagttgaccggcatccgtaccggtcaagcgacactccggatgcgggcctcaccacatgagatcgtcgggcaccacatagtccttgtagggatcgtcttcgtccggctcctggctctgtacgttgagcagcaccacccgccgcggatcgcgctcctggatcttcaccgccgcatcccggggcacgatctcgtagcgtccgtcatagctgacgatagccaggctgcctcggctcagcttgtcgcggatcaggtcgttgaccgcgatccgcttgaccttcttggcgtcgacgaaattgtagtagtcgtcgctttccagcttgggcaggcgcgtcccttcgataagttgcttgatctgcgcggccttggccttcttctcggctttttcctgctgctggcggttcaactcctggtcgcgcgccagcttttccgccttggcctgctccgccgcctggcgctgggagtcgtccttgtcgacctggttcttgtgctccaggcgctgctgtttctgtttctgcttggtggcctgcttggcctgtttctcattgaccagcccggctttcagcaactggtcacgcaatgacatgctcattcgtcaacgactcgctcgcgtggcacgcccggtggggtgcggcataatcttccagccgactggggttcagccggccctcgcagggggtataatcctccagcctcagccgcctcaacgcaagtctcggcggctcgcaaactgccacgcatgccctggagacccctccctaccgtcccgagcacccgcaggcactcctcccggcccctgatatcgaaggcatggaaagcaaggcatgagcgtttctctcctggtaaaagtcactctggtgggcctgttcgtcgccagcgtcctgttcgtccatttccgtgggcgcgcgcgcttgcccttcctgcgccaactggtcaaccactccgcctggttcgccccctacaactcgctgatgtacctgttctccagcgttccctcgaagccctatctggatcgcagccgttttccggagctggacgaactgaagaacaattggcaaaccatccgcgaagaagccctcaacctgttcgacgagggttatatccgggctgccctgaacaataacgaagccggcttcggctcgttcttcaagaaaggctggaagcgcttctacctgacctggtacgacggcccgctgccctccgcccagcagctctgcccgaagaccgtagagctggtgagccgcatccccaacgtcaagggcgcgatgttcaccctgcttcccggcggcagccacctgaatccgcaccgcgaccccttcggcggctcgctgcgctatcacctcggcctgtccacgccgaattcggacaactgccgcatctacgtcgacggccagccctacgcgtggcgtgatggcgaagacgtgatgttcgacgaaaccttcgtccactgggtgaagaacgagaccgagcagacccgggtgattctcttctgcgatatcgagcggccgctccgctcccgcctgctgacccgcctcaatcgctggatcagcggcattctcgggcgtgcgaccgcaccgcagaacgtcgaaggcgaacgcgtcggcagcatcaaccaggcctactcggtcgccattcgcggcggcaatgccatcggcgcccaggtgaagcgcttcaaacgcgcctacccgaaggcctaccgaatcctccgcccggtgctggcggtgatcctgctggtcatcctctatcgttggatcttcggctgattcagatgccgtggcagcccggctgccacggtaattttcccattaacagccgggcgcgctcctctccgctttcttagcctcgccccagaggctgtccagttcctccagcgaacactcttcggctttccggccggcttcgcgcaggttccgctcgatgaaccggaatcgccgctcgaacttgccgttggcctggcgcagagcagcctccggatcgaccttgagatgccgggccaggttgaccacgacgaacagcaggtcgccaacctcctcgcccacggcaccctcgtcaccctctgccatcgcctcgaggacttcgtccagctcctcgcgaaccttgtccaccaccggcagcgcttccggccagtcgaagccgacctgcgccgcgcgcttctgcagcttcgccgcccgtgacaacgccggcagggcgacaggaacgtcatccagcagcgacaactgctgcggctccttggccttggcggcacgctcctcggccttcagttcttcccagcgctgcttgaccgccgcttcggccagcttcgccgcatcgggcttgccatagagatcgccatcgaggaatacgtggggatgtcgacggatcagcttgcgggtgatgccgtccaccacctcgtcgaaagcgaagcgatcctcttcgcgagccaactggctgtaatagaccacctggaacagcaggtcgcccagttcctcgcgcaattgcgggaaatccccctgttctatggcgtccgctacttcgtaggcttcttccagggtgtgcgggacgatggtcgcgtagctctgctggagatcccaggggcagccgaattcgggatcgcgcaggcgcgccatgaggtggagcaggtcgtcgagtcggtacatgggtatctcgggtcttcagtgaacggtccgggcattctgccctttccggaaacgaaaaggccacgggcagcctgcgagcgcccgtggcctgtttccgcctcgcctcaaggcgtacggttgcgccgcgcctcgatgatgttgggcagttgcgagacgcgcgccagcaggcgtccaagagcgtccagaccgggaatctcgatggtcagttgcatggtcgcggtgttgtcttccttgttcgaacgggtattcaccgccagaacgttgatccgctcattgagcagcacctgggacacgtcgcgcaacaggccggaacgatcataggcacggatcgcgatatccaccggataggtgcgaaccggctccggcccccaactgacctggatcatccgctccggttcgcgtcccgccagttgcagcgcggtggcgcaatcctggcggtggatggtgaccccacggcccagcgtgatgtagccgacgatgggatctcccggcagcggctggcagcagccggccatctgcgtcaggaggttgccgacaccctggatctgcacgtcgccgcgcttgccgtggccgatcttgctcggcttgcgcgggatcagttcgagttgctcgctgtcgcggtccggctcgaccagttgctgggcatagttgaccaggtgcgccaagcgcaggtcgccggcgccgagagcggcgaacatatcctcggcggtacgcacgttggccttctccgccagccggtcgaaatccaccggcggcagcgccaggcgcgacagctcgcgttcgatcagggccttgccggcagcgacgttctggtcccgcgcctgcagcttgaaccagtggacgatcttcgcccgcgcccgggaggtggtgacgtagcccaggttgctgttcagccagtcgcggctcggaccgctgtgcttgccggtgatgatctcgacctgctcgccggtctgcaggctgtagttcagcggcacgatgcgtccgttgatcttcgccccgcggcagttgtgcccgacttcagtgtggacccgataggcgaaatccagcggggtcgcgcccttgggcaggtcgatggcatggccgtcgggagtgaagacgtagaccctgtccggctcgatatcgacccgcagttgctccgccaggccaccgatgtcgcccagttcctcgtgccattcgagcacctggcgcagccaggagatcttttcctcgtaatggttggagctggccttgacgtcggtccccttgtagcgccagtgcgcgcagactccgagctccgcctcttcgtgcatggagtgggtacggatctgtacttccagcaccttcccctcggggccgatcactgcggtatgcagcgagcgatagccgttttccttggggttggcgatgtagtcgtcgaactccttgggaatgtgccgccagagggtatgcacgatgcccagcgcggtgtagcagtcgcgcatctccggaacgagcacgcgcacggcgcgaacgtcgtagatctggctgaagtccaggcccttgcgctgcatcttgcgccagatcgaatagatgtgtttcgcccgtccgctgagatcggcctgtacgccggtggccgcgagagcttccttcaactggctcatcacgttggcgatgtactgctcgcgatccagccggcgctcgtgcagcagcttggcgatctgcttgtactggtcgggctcgaggtaacggaaggacaggtcctccagctcccacttgatatgcccgatgcccaggcggtgggccagcggcgcgtagatatcgaagacttcccgggcgacgcggtggcgcttttcctcgtcggcgttcttcaccgcgcgaatggcgcaggtgcgctcggccagcttgatcagggcgacgcgaacgtcgtcgaccatcgccaccagcatcttgcgcaggttctccacctgcgcctgggtacccagcaccatggaatggcgcggattgaggctggcgctgatcgcggccatgcgcagcacgccctcgatcagcttggccaccaccggcccgaaatgcttgttgaccgcttccagggtgatcttgccttcccgcacgcctcgatagatgaccgcggcgaccagggactcctgatccagcttgaggtccgcgaggatctcggcgatttccagtccggtctggaagctggacgtgccttccgcccaggagttctgtgcggcgatcgctcgctgctcggattcgcgagcgaactcgcaagcctccagcaagccctgacgatcgagcccggggacgaggttctggacgtggtccagccaggcctcgaggttgatactgccgtcggtgttgaccggctggtgcgctctcacctgtaccatcttgcctaccctttaccacggtgcgcgtagcccaccgatgactgcgccagccttcgaacgggctggtcggattacgcaggcatcctagcctgcctcgaacaaagccatggcctcgacatgtgcggtctgcggaaacatatcgaggattccggcgcgcttcagacgatagccctgcctggccatttcgccagcatcgcgcgccagggtcgccggattgcaggatacatagactaccctccgggcacccagagaactcatttcgcgtaccgcctcgaacgcgccgtcgcgcggcggatcgagcagcacagcggtaaaaccttgctccgcccagggcgcttcggcaagcgctttggacaggtcggcctggaaaaagtgcgcgttgccaaggccattggccagcgcgttggcgcctgcccgctcgaccatcgccgccacgccctccaccccgactacccgcgccacccggcgcgccagcggcagggagaaattgcccagcccgcagaacaggtcgaggacccgctcgtcggcggtcggcgccagccagtcaagggcctggcggatcatcgactcgttcaccggcgcattgacctggacgaagtctccgggtcggtatgccagagtcagttgccagtcacccaaggagtagcccagttcggcggccggctccaccggcaagggctgttccgcaccttgcagccagagctgggcctggtgtgcggagcagaaagcggccaggcgctggcgatcctcgtcgaccagggcagtcgtatgccgcaacagcaatgcactggccgtgccatggaagagctccacgtggccgatgctttccggcttgcggaagtcctgcagaagagcaggcagggcacgggcaatcgtttgcaaaggcggcaccaggaccaggcactcatcgaaggcgacgatctcctggctggccgaggcacggaagccgacatccagacgccgcgccctggcatcccagcgcacggcgatccgagcgcggcgccgatagccgaattcgggcccgaccagaggggcggcccattcttccggctcgatcccggcgaaacgctgcaactgctcctgcaaggtacgctgcttcagggccaactgctcgccgtgttccaggtgctgcagggtgcagccgccgcagcgacccgctacagtgcagggctcgcggcgacgcaggtcgctactgctgaacaggcgctcgctgcgcgcgtcgaccaccttgcttcgtgcgcccagcacccgggcctcaagttcctcgccaggcagcccgccgctgacgaaccaggtcatccccgcctcgtgggcgatacctcggccgtcatgggccaggcgctcgatggtcaggcgctgcttcttgcctaccggtatcgcgggaccgcgcgcaccaccgctgggctggaagcgcagcccgcccttatttctggccatggacatgctcagcgcgggtcatagacgccggaagacaggtagcggtcgccgcggtcgcagatgatcgccaccagcacggcattctccagttcgcgggacaggcgcagcatcgccgccaccgccccaccggaggacacgccgcagaagatgccttcctcgcgggccagccggcgcatgatgtcctcggcttcgtcctggtgcatgtcgacgacccggtcgacgcgactggcgtcatagatcttcggcaggtattcctgcggccagcgtcggattcccgggatggccgagccctccatgggttgcaggccgacgatctgcaccgccgggttctgctccttgaggtagcgcgagacgcccatgatggtcccggtggtgcccatggagctgacgaaatgggtgatgctgccgccggtctgctgccagatttccgggccggtgctgtggtaatgggcttccgggttgtcgccattggcgaactggtcgaggaccttgccgcggccttcgcgctgcagcttgtcggccagatcgcgcgcgccctccatgccctcttccttgctgaccagaataagctcggcgccataggcggtcatcgccgccttgcgttcagccgtggagttgtccggcatgatcaggatcatcttgtaacccttgatcgccgccgccatggccagggcgatgccggtgttgccggaagtagcctcgatcagcgtatcgccggggcggatgtcgccgcgcagttcggcacgggtgatcatcgacagggccgggcggtccttcaccgatcccgccgggttgttgccttcgagcttcaccagcagggtattggaggtttccccgggaaggcgctgcagacgcaccagaggggtattgccaacgcagtcggcgatagtcgggtactgcacggtcatggaggcactcgttcggcactgacggtaaaggctgagcatgataccgggaaactggggccggaccctagcaccgcaatatccggtcatgcatgccgattcagccgaaagaccgcccgaaacggcatgcgatgcgatgatcagaggcgtccgaagagaaaacctggcgttggacagccgatgcctgaccaacgccaaagaaaggtccgacaggcgttgcgcctgccggtgaaagcacgttggccgcggcgatcagaacgaggtggtcatcgaaacgtagtaggcgcgacccggctcgttgtaggttgccgcgccggcgtcgaaggagttgccctggcggtacaggcgcttgtcgaagaggttgcttaccccgccccgtacgctcaggttctcgctgaaggtgtagccggcgctgacgccccagatgccataggtacccacctcttttcgcgagaccaccggcgtgttgcggctggtgccatgcttcggcggctcctggcggccgtagatggtgctggtcagttgggtggaaagacgctcgctggcctgccagtccagggtcgagttcagggtgtactcggggatcaccgaaagcgggttgccggtgtccttgtccttggattgcagcatataggtcaggttggtgctccagctcaggtcctcgtgcagggggaccagcaggttgccttccaggccctcgaccactgctttcttcgcgttgctccattgcaggatgttgttaccggtcccggtctgccccatgacatccagcggcgcgacgatcttgttcttgtagtcgttgcggaagtaggtgagcccggcgacccagccgtcgcgccggaactcgatgcccagttccttgtttacgctggtctcggcgtccaggttctcgttgccgaccaggtagcagccgccgctgctggtctggatcgggcagccgttgccacgggtatagagcaggtagttcgggttgctctggtacaggttgggcgccttgaaggcccgtgcgataccggccttgaccgtgaagtattcgccgagcgtctgggaagcgttcaggctcgggctccagttcaggccgaagtcgctgtgatcgtccaggcgcagcccgggggtgagcatggtgccggggcgcagttcgatattgtcctccacgtacagcgcgcggatctccgccttgcttttcgggcttcgcgagccggccgcgggggtccccggcaagctatcgcttcccacgaagccctgcttgagcgaggacgggtcgttgagggtttccttgttccactccgcgcccaccgtcagcacctgctcgaacaacgcatgcaacggaaggttgagttcgccgctgaggcgatagttctccagcttgctggtgctgaacgaacggtcggcgccgatctgcccctcgacggaaccggccagcccctcctccagacggttgttgcgggtggagtcgtactgggcgacgaacctggaagtaccgaacgaccaggtcccgttgtgggtgatggcgtagttctcgcgatacatgcggttggtctccgcaccgtcgtcggcgagtccctgggtattggcggtgccgttgttgttctgggtatcgccggcatagatgttgccctgtcggctgaagcccgcttcgaaatcgacgacctggtcgggggacacctgccacgacagcatcccgctgagatcgcgattgcgtaccccttcgcgtccggccacggtacggctcgggttgacggtatgtccgaggttgatgtcggtatcgtccgaatcggtcttgttcgcgctgccgtacgcgcggaagctcaaggcttcggtcagcggcccgctgaggctgaagttggcgcggcgcgtggcgccatccttggagctttccggaatgttggtgaacaccgtcatggaaccacgcaaacgatcggtcgggcgcttggtgatgatgttgactaccccgcccgccgcgccggaaccgtagcgtgccgccgcgggcccacggaggacctcgatgcgctcgacctcctccggcggcacccagttgctgtcgccgcgggtgtcgcgttcgccgcgccagccgtagcgcaccgagttgcgcgagctgaccggtttgccgtcgaccaggatcagggtgttctccggccccatgccgcggatgtcgatctgccggttgttgccgcgctggccgctggaactgttgccggtgaggttgaccccgggcatggtgcggatgatctcggagagatcgttcaccggcgggcgcttcctgatgtcctcggcggtgatgatggatacccccggtgcctgcttgagttcctgttcggcggtgcccagcaccacctcgtcacccagctggaccaccgattcggcgcgttcgtccagttcttccaggcgctcgtcctcggccagggcctgcccgcccagcaggctcgatgaagcgaaaaggacggcagcggcgagatggccgcgacggaattgggggtacatgcgtgactactcctgtcgagggaaaacgggtagcaggcgagccacgagggatacgttgacgttttttctgaagcctgggtcgccggcgttgcgcgggtgacgtctcggcacgggtaggacagggcgcagacccggaacaaggccggccgaggagatcggcacggatgataatcattcacaaaagagagtaaagatcatttacatccaggccaaatgtaaaggcacctgcgcctcgctaggcagaaggcagcaccaggcacaggcgcagccccggatcggcggcttccgcccataggcggccgccctggagcaccacggcgcgacgggcaatgctcagtcccaggccgaagcccttgccggtacgtgccgaagacagccgggtgaacgggcggaagatggtctccaactggtgctcggccacaccctcgccctggtcttccaggcaaagccgccagcaacttccttcgcgccgaccatgcaggcggatcacgccgtcttccggcgaatgccggatggcgttgcgcagcaggttctccagggcctgggcaagtgcattgaggttgccacgcacgacacaatcctcgggcagagcgctgcggaaccgctcggcggcccagccgctttcgaagcgtgcgttctccaccagcaggtcccataacgccgggatggaaatgtcctccagcgccaataccgggcgttcggtgtccatccaggccagctccagggtgttgtccaccagttgctgcatgccctgtacctcctgctccaggcgctcgcgcaggagctgcgcggacagcgtgccctctgccgccacctgcaggcgcgccagcggcgtgcgcagctcgtgggagagatcgcggagcagttggcgctgcaacaccatgtgctcgtcgagtcgctcggccatatggtcgaacgcccgccccagatcgcccagctcgtcgctgcgccggctgatctctgcctgcgtacgcgccgtcaggtcgttgccgcgcagggcattggcctgcgctcgcaggcgtcccagcggcactatccagcgccgatacagcaacactcccagcagcagggccagcccggccggcaccaggccatgggtgaccaggcgcttggccggcgacaagccgggagggacgaactcggcgggaagacgcaggaccacccggccttgctccggatgttcggggaagcgcaggctgatgaacggccgcgacaacgaacgggagctcatcggccagtcgacgccccgcaggaaagtcaggcgttcggcttcctccgtggtgagcggacgactgcccagcgattgcagccgtccgtcgagcacgaccacccagtccagcgcccgctggcgcggctcggccagccaatggtcgatgcccttgcggccatcgtcgagccaggcacgctcggctcgccgcgcataatccgccaaggcggagcgggcttcggcggacaggtagtaacccttcagttcagcactgcgtccccaggtccaggacagccataccgatagcaggaagaacgccaccagcaccagggccaggcgccagaacagcgaatggcggttgggcatcatggcgccggtgtcaggacgtaacccttgccccagacggtatgcaactggtgaccggcgtaaccgaggcgttgcagcttgcgccgcaggtgactgacgtgcatgtccaggctgcgatcatgctgggtatgaccgcggtgcaggacatgctggtaaaggaaggccttggtcagggtctcgccttccgcggcgaggaaggtttccagcaggcggtattcggtcggcgtcaggccggcgaaccgctcgccaaggctgacatcgcagacatcggcagagaattgcagcgagggccgcgccagcggttcggcgcagcggcccggcgcgcccccccgctccagggcgatccgacgcaggatggcatcgatgcgtacccgcagctcggccaggctgaaaggcttcggcagataatcgtcggcgccctggctgaacccggcgatgcggtcctgctcggcgcccagggccgacatcaggatcaccggcagcgcctgctcctggcggagctggcgaagaatctcgaggccatcgcgccccggcagcatgatgtccatcaggatcaggtcataggcgccgctgcgcgcagccgccaacccctcttccccgtctcggcaccaggtcacctcgaaaccgctgccattgaggtgctggaacagatgtgcgcccagtgtcggatcgtcctcgatggccagcagtcgggggtcgggcgtcagggatgggagcatggcagccaaataagattgattagcaatcgtgccagtattcacgatctttccgcttcgtcgcaagccgaatccgccgggctgcgcacatcggtgcagattccccttccgcgacccgctaaactgcgcggggtaaacgtatggccggggagcgtcggccatcccgatctggctcgacggagagacgtgtgttcaaggatctcggcatcaaggggcgcgtactgctgctcaccctgctccccaccagcctgctggcgatggtgcttggcggttacttcacctgggtccagctgtccgacatgcgcgcccagttgatcgagcgcgggcaactgatcgccgaacaactggcgccgctggccgccaccgcgctggcgcgaaaggataccgccgtgctcaaccgcatcgccaacgaggcgctggaccaaccggacgtgcgcgcggtgaccttcctcgacgcccgccaggaacgcctcgcccatgccgggccaagcatgctcaccgtcgccccggccggcgacgccagccatctgagcatgtccaccgaactggacaccacgcacttcctgctaccggttcttggccgccaccacagcctgtccggcgccaccgagcctgacgacgagcgcgtactcggctgggtcgaactggaactgtcgcaccacgggaccctgctgcgcggatatcgcagcctgttcaccagcctcttgctgatcgccgccggcctcggcgtcaccgccctcctcgccctgcgcatgagccgcgcgatcaacgcgccgctggaactggtcagcctggtctaccgggataccccgatccaattgcagggcgacccgcagcggctgaagcagatcctcaccaacctggtcggcaacgccatcaagttcacccagggcggcaccgtcgccgtacgcgccatgctcgaggacgaaagcgacgaccgcgcgcagctgcggatcagcgtacaggacaccggtatcggcctctccgaggaggaccagcaagccttgttcaaggccttcagccaggccgacaactcactgtcgcggcaagccggtggcaccggcctgggcctggtgatctccaagcgcctgatcgagcagatgggcggcgagatcggcgtcgacagtacgcctggggaaggtgccgaattctggatcagcctgagtctgccgaaaagtcgcgacgacaacgaggagccaggcgcctcctgggccgcgggccagcgcgtggcgctgctcgaaccgcaggagctgacgcgccgctcgctgcaccaccagctcaccgacttcggcctggaagtgagcgaattcgccgacctcgacagcctccaggaaagcctgcgcaacccgccgcccggccagttgccgatcagcctggcggtgctcggcgtctcggccgcgatccatccgccggaagagctgagccagtcgttctgggaattcgaacggctcggctgcaagaccctggtgctctgcccgaccaccgagcaggcgcaataccacgcgaccctgcccgacgaacaggtcgaggccaagcccgcctgcacccgcaagctgcaacgcaagctgcaggagttgcttcaagtccgcccgacgcgcagcgacaagccccacgccatggtttccggacggccgccacggctgctctgcgtcgacgacaacccggccaacctgctgctggtgcagaccctgctcagcgacctcggcgcccaggtcaccgcggtggacagcggctacgcggccctcgaggtagtgcagcgcgagcgcttcgacctggtcttcatggacgtgcagatgcccggcatggacggccgccaggccaccgaggcgatccgccgctgggaggccgagcgggaagtcagcccggtgccggtgatcgcgctcaccgcacatgcgctttccaacgagaagcgcgcattgctgcaggccggcatggacgactacctgaccaagccgatcgacgaacagcaattggcccaggtagtgctgaagtggacgggactgagcctgggccagtcgctggccagcatgagccgtgcgccgcagctcggccagttgagcgtgctcgaccccgaggaagggctgcgcctggccgccggcaaggccgacctcgccgccgacatgctggcgatgctgctggcctcgctggcggcggaccgccaggcgattcgccaggcccgcgacaacgacgaccgcaccgctttgctcgagagggtccaccggctgcatggcgccacccgctactgtggcgtgccgcagttgcgcgcggcctgccagaccagcgaaaccctgctcaagcagaacgatccggcggcggccgcggccctggacgagctggacaaggccatcgaggccctggccgacactgcctcggccaccacccacctctcctccaccagcctcgactccagcgaactctgaccatgcgcatcctgttcttcagcacccaggcctacgacagcgagagcttccaggccagcaaccaccggcacggcttcgaactgcacttccagcaggcccacctgcaggcggacacggcggtcctcgcccagggcttcgaagtagtctgcgccttcgtcaacgacgacctctcgcggccggtgctggaacgcctggcggccggcggcacgcgcctggtcgccctgcgctcggccggctacaaccacgtcgacctggccgccgccgaagcgctcggcctgccggtggtgcacgtcccggcctattcgccgcacgctgtcgccgagcacgcggtcggcctgatcctgacgctcaaccggcgcctgcaccgcgcctacaaccggacccgcgagggcgatttctcgctgcatgggctgaccggcttcgacctccacggcaaacgcgtcggagtgatcggcaccggacagatcggcgagaccttcgcccgcatcatggccggcttcggctgcgagctgctggcctacgatccctatcccaatccgcgcatccaagcactcggcggccgctacctggcgctcgacgccctgctcgccgagtccgacatcgtcagcctgcattgcccgctgaccgccgacacccgccacctcatcgacgcgcagcgcctggcgacgatgaaacccggcgcgatgctgatcaataccggccgtggcgccctggtgaacgccgcggcgctgatcgaggcgctgaagagcggacaactgggctacctcggcctcgatgtctatgaagaggaagcggatatctttttcgaggatcgctccgaccagcccctgcaggatgacgtgctggcacgcctgctgagcttccccaacgtggtggtgactgcccaccaggccttccttacccgcgaggcgctggcggcgatcgccgacaccaccctggacaacatcgccgcctggcaggacgggacgccgcgcaatcgggtccgggcctgatggcgtggtagcatgcgcggctgattggaggctccatggctgaacacgatttccgttacaccctgctcaacccgcaatacaccctcaacgaatgccgcgcgctctccccggggcgctaccaggtcaccggcaccggcggctcgatcaaggccgacgacgtgctgctggtcagcctcaagggcagcaagaccctgagcatgcgcctgaccgtggaaaaggtccgccacctgatcaacccacccggccagtggctggcggtcgcccgcggcccagcgttccgcgaactggcgatccatacctggcaggtcgactgcgaccagtgccaggctcgtctcgacttcgagttcgccgtggacgccagtctcggtcgcaaggccctggcgccggccgccgaagagcgcattcacgaactgggctggagcagccgcgaaggcaagcacctgtgcccgaaatgccagtagggcgaacgctccgtccgaccgacggtctgtgaactatcgcccgtacgaaatgcgcaaaggaaacgccatgaaaccctctctcgccctcttcgcctccaccgccctggtcctgggcggttgcgccagccaggagaccaccctggaaaccgagcaggcctaccaggtcgactgggtcggcgcacaaccgacgatggactacagccacatcagcctgaccttcgacggccagggccgtgccttcggcaacggcggctgcaaccactggttcgccagctacaccttgcaggacgacctccttcagttcggcgccatcggcagcacccgccgcctgtgcgcggcggagatcatggagcaggaacggcgcttcctggccctgctgcagagcgtccagcactgggacatttcgccgtccgacgagctgcgcctgtggccggccgaaggcaagccgctgcgcctggtccccgagcacgactgaagcctgaagcggcgctacccggcgccgcccgtttacatttttttgacatccatttcattcccgcttgaccaccacgtccctaggcttccgcatcctcgcccggagacgcttgatgttcgccccccccagcaccgagacactcaaccgcttctttctgttgtcgtggctggtggtgctctggcaggtgctgcgcctgcaggacgggatcgtcttcgacgacgcctggctgccgctctggagcgtcgctgccagcctgagctacgccttcctttatatagtcccggtgtacctcgcctgccgactgctcctgcatttccatgatcgccttcccgtgcgcctcagtccgtggctggcaggcgtgctggccatcgtcggcagcgcgacggtacagatactgctctacgccgaccgcaccctctacgacctgtacggattccacctcaacggtttcagcatcggcctgctggtctcgcccggcggcctctccagcctcggcagcggcgacggcaccctgctcagcgcaagcctggcggccctggccctgctctgtctgcaggtgctgctgtacagcgcctgccaggtcagccgcgaacgccttcccgcgctccctcggcgcgcctggcgctacctgttggcggccttcctctgcctggccctgggcgaacgcctggcctatgcgttcagctccctgcgcgactaccggccgatcctgctggccagcgaacgctatccgctgtacctgccattgaccgtccgcagcctggcgcgaagcctgggcatccagccgacgcccacccagcgcgagctgctccagcagcagagcgacctgcactatccgctccggccgctggagatcagcgccccggcgcaccctttgaacatcgtctggatcgtcgccgagtcgctccgcggggacatgctcgatccgcgctacatgcccaggctgtgggacttctccaaccgggcgatccgcctggacaaccactacagcagcggcaacctgacccagatgggcgtcttcggcatgttctacgggctgcacggcggctactgggacgccgtgctgaaggccggccagccgccggtgctcatggaggtactcaggcagcagaactaccagttccggatcaatgccgcgcaacgtttcagctatccgcccttcgaccgcagcgtgttcgtcaacctgcgcccccaggacctacacgtgctggatagcccggagcctgcctggcagcgcgacgcccggaacaccgacgacctgctgcgcttcgtcgatcgccgactacccgaccggccgttcttcgcctgcctgttcctcgagtcgagccacgccaactacagcttccgcgacgagaccgcgaaaatccgcccctatctggtcaacttcaactacctgaccaccgatttccaggcgcagatgccgctgatcaagaaccgctacctgaatgccgtgcgcgaagtcgatacacagatcggccgcctgctgcagcacctggaaaaccagcacctgctggaaaacaccgcggtagtggtgctcggcgaccatggggaagagttcatggaacgctcgcgctggggccacaataccgagttcaatcgctaccagaccggcaccgtcgccgtgctgagcattcccggacaggcgccccgtgccgtccgcggcatcaccagccacatcgacctgcccgcaacgctcctgccgctgctgggcgtacgcaatccgccccgcgactactcgctgggacaggacctgctcgcagcggactaccatcgcgactatgcggtgagcgccgataccacgcgcatcgcctacctgggcgaaggcttcaaggtgagcttcccactgcgtggcgcggaccgtcaccacggtccggtgagcgatggcgacgaccgcccgctcgacgtggaacaacaggaagccatacgcggcccactccgtgcagcacgcctggaactgctgcaggatctcggccgcttcagcgccttgccggtaggggaagagccgtcgccgcggaacctcgcgacttcgttgaggccatgaggagcatcagaacagcctgagttgttcgtgggcgccctgcaggtcgagcaggcgcacgccgacgccgatcaggcgcaccggacgattgccacgggcaaaggcctggccgagcaattgccggtagctctccaggtcgcgcccggcgccggactgttccaccgtggtctgggtgaaatcgtgaaacttcagtttaacgaacggcttgtccggccgataactgccatccaggcgttgcaggcgtccgtccagctcctcgagcagggtcggcagttcctccaggcaagccgccaggtccggcaggtcgcgatcgaaggtacattcgacgctcaccgactggcgccggctgtcgacttccaccggtcgctcgtcgataccatgggccagtccccacaggcgttcgccgaagctgccgaactcgcgcaccaggctcagcttgctgccctggcgcaggtcggcgcaggtgcggatgcccatccgcgccaggcgctccgccgtgaccttgccgacgccatgcaacttggccaccggcaactcggcgacgaacccgtcgacctgctccggggtaatcacgaacagcccgtccggcttgcgccagtcgctggcgatcttggccaggaacttgttcggcgcgacgcccgccgaaacggtgatgtgcagctcctcggccacccggcggcggatgtcctgggcaatccgcgtggcgctaccggcgaaatgcggcgaagcgctgacgtccaggtaggcctcgtccagcgaaagcggctcgatcagatcggtataatcgcggaagatcgcatggatctgcttcgacaccgcccggtagacatcgaaacgcgggcgcaccaccagcagatcgggacacagcttgagcgccgtgcgcatggccatcgccgagcgcacgccataggctcgcgcctcgtagctgcaagtggcgaccactccgcgcttgtccggcgaaccgccaaccgccagcgccttgccgcgcaggctggggtcgtcgcgcatctcgagggcggcatagaaacagtcgcagtctatatggatgattttccgcaccggaatctcgctacaagccccgccgggcctgccccggagcgctgaattctaacattgggcaagcgctaagcatttgaagaaaaaacacttttttcgaaaaatcgattgacagcccgacgagagtccgtagaatgcgcccacacagacgcgggatggagcagtctggtagctcgtcgggctcataacccgaaggtcgttggttcaaatccagctcccgcaaccacattcgaaaagccccggcactagcgatagcgccggggctttttgcattccgcccctcctgttccactgcatcgcctcgccctccgttcgctcgcatcatcgcacatttaactgtatattcgtacagccagctcagccttcgatgaatgctcggtaacggatacggaaaggacagacagatgctgaacgtcgaacaattgaagcgcagcgtgaaccggatggaactcgacgacatccgccaggcagtggacgaactgcagatggacggcctggtcaccgacggcaagacgccgttcacccgcgtgcacttcaacacctgcttcgccgagatcgaggcgctgttccagcgcgccggcttccaccggccgctcgatgtggtcggctaccagggcgagatctatgcgttgtacgacccctctcgctgggaggccgtggaagtgctgcgctggttgaaggaataccgcgaggaatcgcgtcacctgactccggcgtgagcgcaacgcctgcgtcagcgcaactcgtgtgccaggcgcgcgcaggccatccccacgaccagcatcaccagcggaccgaaggcccgcatggagatccgcgcaaggctccaggactctttcgcagcgaacaggcttgccggattcaccgaatagaccagcagggaaccgcagaacagccccaggcccagcaggcccaggcggcgcaaccaaccgtcgtggcggagcaacaccaccagcagggcgccgtacaacaggcaatcgacccgcgccaccgagtccttgacctgcaacgactgttcccaatcccccagccaccatccagcggccacgcccagcacgactccggcgccgacatgaatgcccgcctggatcatcgtcacccttcccccctcggaaatggtcggacagtgcaagccgccactatgcccacggcaagctgaaccatcgctgaacgaataccagcaaatggccttcggccacttcgccgacgcaactcctgcaaaacccggcggtcttctccctgtgacaggacgccgccccgcacagaaaaaatctgctgcgaccacttgggaactcgcccgagaggccatactctgtcgcgcaaattcccatgaggtggctgatgcgcaccgacgctcccgttccagaacatcccgctccacccagctctcccgcgtccccacaacgcatccggctgatcgatcggattaccgcctaccgccagcccatcggcctggtcttcaccttgctgctgttcggcctggcgctggtggcctgctaccacctgctacgggagatcgatcccggcgccctccacgatgccatcgccgacgtgcccaggccggcgctgctcggcgccctgagcgcgaccgccctcggcttcgtcatcctgctcggctacgagtggtcggccagccgcttcgctggcgtcacgctgcccatgcgcagcctggccaccggcggcttcagcgccttcgccatcggcaatgcggtaggcctgtcgctgctttccggcggctccgtacgctaccgactgtattcccggcatggcatcggcgctgccgaaattgcccggatgacgctatttgccagcctttccctgggctgcgcactgccggtgctggcggcactcgccgcactctgcgacctcgacgatgcggcgtcggcgctgcacctgccccgcgccctggtcgccgtcatcgcgatcgccgtcctgtcgctggctgtcggcctggtggcgttcctggcccggcaccgcctgccgggagaacggccgtcccccgacagcctgctggtccgcctcggccgccgcagcctgcgcctgccaggcctgcgcctgtcgctgctgcaactgctgatcaccgccctcgacgtcgccgccgccgctaccgtcctttatctgttgctgccggaaaccccacccttcgcggcgttcctgctggtctacctgctcgccctggccgccggcgtgctcagccacgtaccgggcggagtcggggtgttcgaggcggtgctgctggccgcgttcgccggccaactgggcgccgcgccgctggccgcggccctgctcttgtaccgcttgatttatgtggtactgccactgctgctggcctgccttttgttgctgttcctcgaagcgcgccggttgtgggtgacgcgccaggcgattcgcgtcgcctcgggtttcgccgcaccgatcctggcgatcctggtcttcctctccggtgtcgtgctgctgttttccggcgccacaccggcgatcgacacccgcctggagcacctcggtttcctcattccacatcgcctgatcgatgcctcgcacctggtcgccagcctgatcggcgtgctctgcctcctgctcgcgcagggtttgcgccgccggctgtcggccgcctgggccctgaccctggtgctgttgctggtgggcgccctgctttcgctgctgaaaggcttcgactgggaagaagccagcctgctgagcctgaccgccgcgctgctcgccatgttccgccgctccttctaccgtcccagccggctgatggaagtacccttctcgccgctctacgtaggcgccagcatctgcgtggtcggcgcctcggtctggctgctgctgttcgccaaccaggacgtgcattacagcaaccagctctggtggcagttcgccctggacgccgacgccccgcgcgccctgcgcgccgccctcggcagttgcctgctgctcctggccctggcccttggctggctgctgcgcgcggcaccgccggcgatccgcgagccgaacgcggaagagctgcagcgcgcggcgcggatcatccgccactcggaccagccggatggcggcctggccctgaccggcgacaaggccctgctcttccatgagagcgacgacgctttcctcatgtacgcccgccgcggtcgcagcatgatagccctgtacgacccgatcggcccggccatgcagcgcgccgaactgatctggcaattccgcgacctctgcgacctgcaccatgcccgcccggtgttctaccaggtgcgtgccgagaacctgccgttctacatggacattggcctgaccgccctcaagctcggcgaagaagcgcgagtcgacctgctgcgcttcgacctggagaacaagggcaaggaaatgaaagacctgcgctacacctggaaccgcggccagcgcgacggcctggccctggagttccatgaaccgggccaggctccgctggacgagctgaaggcgatatcggacgcctggctgggcggcaagcaggtgcgcgagaaaggcttctccctgggccgcttcaccccggcgtacctgaacttcttccgcatcgccatcgtccgccaccagggcaagccggtggccttcgccaacctgctggaaaccgacagccgcgaactggcgagcctcgacctgatgcgcgtgcacccggacgcgccgaagctgaccatggagttcctcatgctcggcctcatcctccactacaaggcccagggccacgcgcgcttcagcctcggcatggtgccgctggccgggctccagccaaggcgcggcgcgccgttgacccagcgcctgggcgcgctggtcttccggcggggcgaacagttctacaatttccaggggctgcgacgcttcaaggacaagttccagcccgactgggaaccccgctacctggccgtgccagccgggctcgacccgctggtggccctggccgataccgccgcgctgatcgccggcggcctgactggattggtgaaacgctgatatgtctgtcgtgaaacgtcactggcgccgttttctggtcgccgccctggtgctgatcgtcggtgccgccctgctgctctggagccgaccggcggcccaggcgaaactggaagccctggacctcgacgacggcggccacgccacccttgccgaacccggcgagaagccgcgctcgcgggtggtggtgatcgccgcccccgaacagcaactgaacgacgcccagatgctgaacctggctcacgacagcgccgcccgggtgatccagtacttccccccggaaaacggcgattgcagggcgcagcagtcccggctcgaagcggtcattgcccgcctcggcggcaagccgaacctggtcgccggcatcggcccgggctcgaccaccgcctggcgctggctcgccagccaggacgacgacaaggccaaggcgctctcggtcggcttcgacattgccctggccgagcgcgactgcgacgccccgctgccgcaccaggcgtcgcacggccagtggctgctggcctggaacgacaacccggacgacgacaccgcagtcttcgtccgcaagcagtcgagcgcggaaaccagcatcagcgactacgacaccccgctgtccgacgtgctcgcccatcagttgcgcctgcaactgcaaggcaacgccgaggccctgccggtactcgaggtccccgcggcgaaaccctcggacatcgtcaccctgttctattccggcgatggcggctggcgcgacctggacaaggactctgccgagcatatggccagcatgggctacccggtggtcggcatcgacaccctgcgctactactggcaacacaagagcccggaacagagcgccgccgacctctccaagctgatgcaacactaccgcgagaagtggggcgcgaaacgtttcgtcctggccggctactcgttcggcgctgacatcctgccggcgatctacaaccgcctgcccggaaaggaccagcagcaagtgaaagccatgctgctgctggcgctggcgcggaccggcagcttcgagatcgaagtggaaggctggctgggcaaggccggcgaggaagccgccaccggcccggaaatggccaggttgccggcggccaaggtgttctgcatctatggcgccgaagaaaaggacgaaagcggctgtacccaatcccaggccgtcggcgagaagctcgaactgccgggcggccaccacttcgacgaggactacctgtccctggcgaagaagatgctccaggccatccgcgaccgcgagaacgctcccgacgcctgatcgcgatcaagctctccccgctccgcccttcttgtccccggccggcgccagctagactgagcctgccgggggcattcaggctggcttcagcggagccgccgagaataccggccgacccgccgcagagcgggctcccgagagccgaagagaaggaaccgtgatgagctggaaaaacaccgaatcccgttatgggagcctgaccattgccctgcactggctgaccctgctgctgatcgccggggtctacgcctgtatcgaactgaagggcaatttccccaagggcagcgaaacccgcgaactgctcaagcaatggcacttcatgcttggcctgagcgttttcctgctggtctggttgcgcctgctggtgcgcctggccagccctaccccgcgcatagagcccgccatccccgcctggcaggcgacgctggccaggctgatgcactacgccctctacctgatgatgatcggcctgcccttcgccggctggctgatcctcagcgccgccggtaagccgataccgttcttcagcctggagctaccgccgctggtcgacaagaaccccgacctcgctgggcaaatcaaggaatggcacgaaaccatcggcaacgccggttatttcctgatcggcctgcacgccgccgcggcgctcttccatcacttcgtcagccgcgacaacaccctggtacggatgctgccgcaacggcgctgagaaacgtgcaaaaaaacgcgcccagtcgggcgcgctttttttgcagcggaacggatcagatctcgacctgggttcccaactcgatcacccggttgagcggcaggttgaaatagcgcaggttgccgttggcgttcttcagcaggaaggcgaacagcccctcgcgccagcgcgccatgccgatgcgcttggatggaatcaccgtctcccggctgaggaagtaggtggtgcgcatcgggctgaagtccagttcgttgagatggcacaggcgcaaggccgccgggatgtccggctcttccatgaagccgaagtgcaggatcacccggaagaatccgtcgccataggcctcgacctcgaaacggcgatccggcgaaacccgtgggctgtcttcgttgaccacggtgagcagcaccacctgctcgtgcagcacctggttgtgcaacaggttgtgcagcagcgcgtgaggcaccgcgtcggtacgcgcggtaaggaacaccgcggtcccctggacccggtgcggcggctgcacgcgcatgctggaaatgaacaccgagagcggcagagagccctcgtcgagacgctccaccagcagttggcggccacgcttccaggtggacatcaggatgaagatgacgatacccgcgatgaccgggaaggcgccgccctggatcaccttgggcaggttggcggcgaagaacaggctgtccaccgcgagcatcacgcagaagaacgggacgcccagccacagcggccatttccacaggcgccagatcaccacgcccatcagcagggtggtgatcagcatggttccggtcaccgccacgccgtaggcagccgccagcgacgccgaggactcgaagccgagcaccagcaggaccacgccgaccatcagcgcccaattcaccccgccgatgtagatctgcccctgctcgtggctcgaagtgtgctggatggtcatccgcggcacgtagccgagctggatggcctggcgggtcagggagaaggcgccggagatcaccgcctgggaggcgatcaccgtggccagggtggacagcgccaccatcggcagcagcgcccagcccggcgccagcaggtagaaggggttgcgcgccgcctcggcgttggaaaggatggtcgcgccctggccgaagtagttcagcaccagcgccggcagcaccagcaggaaccaggcacgggcgatcggcttgcgaccgaagtggcccatgtcggcgtacagcgcctcggcgccggtcagcgccagtacggtggcgccgaggatggcgacaccgatgccgggatgcgagctgaagaaacgcacggcccatacagggttcatcgcctgcagcacttccggctgctggatcaccccgtagacgcccagcgccgccagggcgccaaaccagagcaccatgaccgggccgaacaggatgccgatccgcgcggtgccgtgcttctggatcaggaacaggccgatcagcacgataagcgccagcggtaccgtccagtgctccaggccgtcgaaggcgatctccagcccttctaccgccgacagtaccgagatcgccggggtgatcatgctgtcgccgtagaacagcgccgcgccgatcaggccggcaaccaccacgaaagtctgcagcctgccgaacggcgccgccgcccggcgcgccagggccgacagcgccatcaccccgccctcgccctggttgtcggcacgcaggacgaagatcacgtacttgatggaaacgacccagaccagcgaccagaagatcagcgacagcacgccaaggacgccatcgtggttggcctgcaccccgtagccgccgatgaagacctctttcagggtatacaagggactggtgccgatatccccatagcagactccaaccgccccgaccatcaggccgatggcagagctggaatgcccctccgacgtctcctcggcacgcgtcgctgcatcactcatgaaacgctttcccccggaaaaattcggcaaatgctgcgcccatgccgtccgcgatgcaagcgccgaggccacggactgctatgactatagaaggccggggagccgattgccgagcgcccgcggtgagtttttccagggccggaaaagagctgcacgggagactggaaaagccgcggcgctgccgctagaattgcgcactttttgatcagaggcgccagcaagcgcgcccgcctaccgaggttagccatgtccacccccactcccaaagtcggcttcgtcagtcttggatgccccaaggcgctggtcgactccgagcgcatcctcacccagctgcgcatggaaggctatgaggtcgttccgacctacgaagacgccgacgtcgtggtggtcaacacctgcggtttcatcgacagcgccaaggccgagtccctggaagtgatcggcgaagccatcgccgagaacggcaaggtcatcgtcaccggctgcatgggcgtggaagagcacgcgatccgcgacgtgcatccaagcgtgctggcggtcaccggcccgcaacagtacgagcaggtggttaccgcggtgcacgaagtggtgccgccgaagaccgaacacaacccgctggtcgacctggtcccgccgcaaggcgtcaagctgaccccgcgccactacgcctacctgaagatttccgaaggctgcaaccacagctgcagcttctgcatcatcccgtccatgcgcggcaagctggtcagccggccggtcggcgacgtgctgagcgaggccgagcgcctggtcaaggccggggtcaaggaactcctggtgatttcccaggacaccagcgcctacggcgtggacctgaagtacaagaccgacttctggaacggccagccggtcaagacccgcatgaaggaactctgcgaggcgctgagcagcatgggcgtgtgggttcgcctgcactacgtctacccgtaccccaacgtcgacgacgtgatcccgctgatggccgccggcaagctcctgccgtacctcgacatccccttccagcacgccagcccgaaggtgctcaaggccatgaagcgcccggccttcgaggacaagaccctggcccggatcaagcagtggcgcgagatctgcccggaactgaccatccgctcgaccttcatcgtcggcttcccgggcgaaaccgaagaagacttccagtacctgctcgactggctgacggaagcccagctcgaccgcgtcggctgcttccagtactcccccgtcgaaggcgctccggccaacgagctgggcctggagccggtgccggacgaggtcaagcaggaccgctgggaacgcttcatggcccaccagcaggcgatttccgccgctcgcctgcagctcaaggtgggcaaggaaatcgaagtgctgatcgacgaagtcgacgaacagggcgcggtcggccgctcctgggccgacgctccggaaatcgacggcaacgtgttcgtcgacagcgacgagctgaagccgggcgacaaggtccgcgtgcgcatcaccgatgccgacgagtacgacctctgggccgagctggtctgagcctccctgaagagccccgccccgcggggcttttcatcgccaaccgttccggagagcacgatgctcaacaacgacgtactacgcagcctgcgctacctgctggatcttcccgatgcacatctggccgaactggccgccccgttcggcgagcaagtcgaagcggacctgctcgaggcttacctgaagaaggaagacgaagacggcttccaggcctgccccgaccgctacctggcgcgctgcctggacggactgatcatccagcgccgcggtcgcgacgagtcgcgtccgctaccgccgctggagctgccgttgagcaacaacatgatcctgaagaagctgcgggtcgccttcgaactcaaggaggaagacctccatgccatcctcgacagcgtcgacttcccggtctccaaacccgagctgagcgccctgtttcgcaagcccggccacagcaactaccggacctgcggcgaccagttgctgcgtaacttcctcaagggcctgaccctgcgcgtccgtggctgaacgcgcggagccactgctggcggttctgctccaggcgccgccctgcgtcgacccctggttcctggagtgccgccaggatcgcgccggcctgaccatcctcgtccgcgacctcgccaaccagcgcacctggcgcgtcgagttcgtcgaagtcgaaggcctgcgccagctcgacgctgccgacctgctggaattctggccagcctgtgcggcatccgagggttggctgtaccgggtcgagcaaggcggctggctggaccaggaatgccgtcgcgagggcttcgtcgcccgcgagaccaaggccgtcgacgagtatttcgtcaatggcggcgatcgctgcctgagcgtgctgtcctggtcgccaccgaaggtttccccgctgatctgaccgccatgaaaaaagccgcccgtgggcggcttctcgcgtggcgctccggctacatcaggaagatcgtcgccaggccgaggaagatgaagaaaccgccgctgtcggtcatcgcagtgatcatcacgctggagcccatcgccggatcgcgtccgaaacgatgcagggtcatcgggatcagcactcccatcatcgccgccagcagcaggttcagggtcatcgcggcggtcatcaccacgcccagttcccagttgccgtaaagatagaaggccaccacgccgatcactccgccccaggccaggccgttgaccagcgcgacgccaagctccttgcgcagcaggcggttgcgactgttgctggtcggctgtacctggtcgagcgcgatggcgcggacgatcatggtgatggtctggttgccggaattgccaccgatgccggcaacgatcggcatcagcgcggccagcgccaccagtttctcgatggagccttcgaacagaccgatcacccgcgaggcgacgaaggcggtgatcaggttggtggccagccaggcccagcggttgcgcaccgacttccagaccgaggcgaagatgtcttcttcttcacgcagaccggccatgttgaggacttcgctttcgctttcctcacggatcaggtcgaccatctcgtcgatggtcagacgaccgatcagcttgccgcccttgtccaccaccggcgcggaaatcaggtcgtaacgctcgaatgcctgggcggcgtcgtagccgtcctcgtccgggtggaaggtcaccgggtcagtggccatgacttccagcacttgcttgtccggatcgttgaccagcaggcgcttgatcggcagcacgcccttgagcacgccgtcgtagtcgaccacgaacagtttgtcggtatgcccgggcagttccttcaggcggcgcaggtagcgcagcaccacttccaggctgacgtcctcgcggatggtgaccatctcgaagtccatcagcgcgccgacctggtcctcctcgtaggacagcgccgaacgcactcgctcgcgctgctgcgcgtcgaggctttccatcagttcgtggaccacgtcgcgcggcagttccggcgccaggtcggcgagttcgtcggcgtccaggtccttggtcgcggcgatgatctcgtggtcgtccatgtccgcgatcagggtttcccggaccgcgtcggagacttcgaggaggatgtcgccgtcgtcctcggacttgaccagctgccagaccgtcaggcggtcgtccagcggcagcgattcgaggatgtgggcgatgtcggcggggtgcagttcctccagcttgcgctggagttctacgagattctgccggtggacgaggttttccacccggtcatggtgctggccttcctgacgatgggtcaggtcctccaccaccttgtggcgatgcagcagctcgaccacctgcgctaggcggtcctgcaggctttcctgcggcttcttggcttctacttcggtcatagcgcgctccacccccagtagcggagcacgccaaaggggtcaatcagaaacgtgattggtcaaacgggaaactgttcgagtttctactgggtaagtccatgggggtgttccaagggccctctcggggcagatacggataatgataacactccgcttgcgttttgcgcgttacaaaatggcggcaagaacaagcgcttgcggcacaaagttcatcgtcactcgacgcctgactgcgacgccggaaatttcactcaggacactcggccccgcggaaaaagggaacgcgttagcctgcactcacccttatccgacccggagtgccggccatgcgttccctgtccctccttctcctcctctcgctggcgtcccacctgcgaggccgctgcggtattccgctgcgaagacgccagcggccatgtcagcttcacccaactcggttgccccgccgggcaggccggcgagaccgtcgtggcggacaacccgccgccgggaggcaggagcgtcacgccgagggccgagacgaagacgaaaaaggcgtccatcggccggaaaagcgtgccgctcgcggtgatcggagaaagagaagatcgctgcggaagacgcctggacgagaaggaacgccgcaaggcgatcgtggagcagcgaataatgacgggaatgacccgctccgatgtggagcgggcgctgggcaagccggaccgggtcagcgggaacaatgcggaggtgcgttatcagtacaaggccgacaagcgacggggagcgagaagcgtgagcttcgatcaggagggatgcgtgaagggaaagggaaggtaccgggtggagcgagtcgatcccgggagctaaggccgggccgacctcataccgatgaaagcaggaccggcatcgcctttagcgtgccgggcagggtgtcgccctgcccgcatggaaaagacggacgacagtcttcagcagcctaccgcctacccgccgcgcacgcctctggctggcggttatggtcaggctcaatcctctttctgcggttcgccgggcaacaacgcgcgtgatgaacagaccgcgatacaggtggaatcccgtttgcacgtccaccgtttcggaagcgccttgcagtgaagtcaaggcagcgatgcccttgcgcacacggtactcgttcaacgcgcggctgcctccctccatcggcagcaaggagggcaacggctcgccagcgggcgcatggtcgacaatgctgccgacgatggtgatgagctggtcgccgcgcgcgctgacggcagcctgcgcgaggttttcggaaatcaccgcatccaggcgaacgatgccgacgtgacgattgatcaacatgaccatggatctctcctctatgtatggatggcatcgctacgatgcatcgcaacgacctctaggaagccgttccacccgtccccccggaggcctgcccgggagcggtgcgctcgaggtcgacgagcagcacgtgttcgtgagcgagaacaaggtcgaaacgagcctgccccagcgcctggccatcctgcacgacggacaggttttcgatgggtgtcaggcgcagcaggctggccttcagcacgcgcaggcgctcgccggcattgcctgactgcagcaggcagcgggcatcctgcaggtactggtgcgcctcgggaccatgccaggtcaggcgaaagatgctctcgcaactggccagcagggactcctgctcaccactggcggaaaactcccgccgcaccttgccaagcaggctcgaggactccaggcgcaaggtcatgaaggggatggccggcggggccagcagttgatcggcatcgatgacgctgccggcgggcaggccgaacaactgccgcaacgtttcgcgcagggcggcgtgatccaggcgcacggttgcactggacatggcgaactcctttttcaggatggatggatgacggacaggcaccgacgcggcggatacaaccgccggccaggccggagcgaagtacgttcgttcaatgcaggcgcaggacccgcgccaggttgccgcgcgcctgcaacagcaggaccagcagcaccagcagtaccccgagcatccacggcgagaggtgctcggcacgatacaacccggccactattcccagcgcctggcagccggtgcacaacgccagcaggtaggcgcacagggaaacgccggggcggaaacgcgcgccggcgcggcgataggtgatcaggcgcatgcagatcgccgagcagaccagcacggtcagggtggacagcggatcaaccatcggacttgcctccccggcggcgcaacagcccgcgcatccaactgggcagttcgccgccacgcatccactcgagcatgccgatgccgccggtcacgcagagggtcgcggcgacgaaggcggccatgccgctggtctgggtcaatccgcggccgagcgcctcgattccggcgtaatagccgccgacccaggacaccagcaggtagccgaggcgggtcagggcgttgtagtcacgggcgaacacgacaaagaagatggcgccgccgaagcctcccagcaaggcgttgccatcgatacccggcaggtacatggccaggccgacgccagccattgcgctggcggcggaggccgcagagcttggctcggacatggatgactcccggaaatgcaaaggcccgccgaaaaggcgggcccggaacggccgaagcccgcatcggcgggcttcggccagaggaatttcaatcgtggagaatttatacctttatcgtcccatagcgtcaatatgggaaaaaccgttttcatacagaaatttttttagcgctcgcccacgatccccacctccgccatcggctcctccagccgctgcaaggcctggcgcagcaaagcgacgacccgctcgcgccattccttgtcccagcgatgcagggtgctcttcgacagcccgctgagtcgctcgatctcgcggatgctcgacggcggacgacggaacatgcgcatcagcaaggccagggttgcccgctgctcgatcgggtcggccccgggcttcagccagtcgcgcaaagccgccaggccaaggacgaaatcccgcccgcgggcgaactcggcccgcaccaccgccagctccagtgggtgcgcagccagctggcgctgggcgaaacgcacggtcatcaccgcctgggcctgccattcgtgcggactcaaaccgctgggcaggtgttcgatgaagctgcgatcgaagcgctcgcgcaggccatcgatcaccatcgccgtcgacgacttcggtcccggctggtgctcgaacatccagtaggccacggccagcgcctgctcggtactttgaaacatggtattccctccttggccggcccacctggctggccgctcgcattagccacccgcagtggctgtgttgggccgccgtcctacccgacgcgagtaggaaagcgctgaaattatggtaatacccatatacggacgcttgcaatgccacaggcacacccttagtctttccacctatggaactcaaagatcgcatcaaggcggcgcgcaagcacgcccatctcagccaggtccagcttgcccaggcggtaggcatgacccagacctccatttccgatctggagcgcggcaagtcccgcgccaccagcttcgtcgcgcagatcgccggcgcctgcggcgtcaaccccctgtggctggcggaaggtcgtggcgagatgctcgccgagcgcggccaggcgaatgcaggacccaatgccagttggcttggcgcagtagagtcatgggacgacgaaacgcccctggatgccgacgagatcgaactgcccttctacaaggagatcgagctgtccggcggcaagggcagcacggtgatcctgcagaccggcgggcgcaagctgcgcttcggcaagtacaccctgcgcaagaagaacatcgatccggccagtgccgcctgcgtcacggtcagcggcaacagcatggagccggtgctgccggacggcagcacggtaggcgtggacactagcgcgcggacgatcaaggacggcgacatgtacgccttcgaccacgacggccaactgcgcgttaaactgctttaccgccttccaggcggcggcctgcgcattcgcagcttcaacagtgacgagcatccggacgagcgctacgagccccaggaagccgccgagcacatcaacgtgatcggccgggtgttctggtactcggtgctggtctgaccccttcccgccccgcctgacgacggggccgcgttccggcggaagaaaaatcccgggcaaagaaaaagggcctgcattgctgcaggccctttcggtatggcgcactcaggaggattcgaacctccgaccgctcggttcgtagccgagtactctatccagctgagctatgagtgcgtgtcggtgctttttccggccacctgccggtaacgcttgttttaccgtgaaagaccgcaactgtcgatccttcgctcgccgagcccctgacgagaggaacccttcgaaatatggcgcactcaggaggattcgaacctccgaccgctcggttcgtagccgagtactctatccagctgagctatgagtgcgtcgtgggggcgcattatagattgtggattttatccgtcaagcgattttttcaatcaaatcagtaacttagttaccaagatggctttcgccgcctgaatcaacctctaacacttgaatggcggagagggggggattcgaacccccgacacccttttgaggtgtactcccttagcaggggagcgccttcggccactcggccacctctccgcaacacggggcgcatgatacccatctttaccccgtttgcaaagggaaaattagataaaaattaatggtttggctcttgatctttctctttctggatgcgctggtaaatttcctcccggtgtacggcgacttccttcggcgcgttgacgccgatgcgcacctggttccctttgacacccagtaccgtcacggtgacgtcgtcacctaccatcagggtctctccgacccgacgagtcagaatcagcattcctttctcctcacgcgaatatttcaggacaacagtctgcaaaaaagaaatggcggcggatccgcagaaatcaagagcgcgatccttcacccagtattgaccagtcccgccggaatgaaagttcctgccaaacggtcaaaaacgacaaaaggcgcggggttgccgcgcctttcgcctgccagcgtcactcaccctgtcgcgccggcgcgtcgagctcgaacgccgtgtgcagagcacgtaccgccagttccaggtacttctcttcgatcaccacggaaaccttgatttccgaggtggagatcatctggatgttgatgctttccttggccagcgcttcgaacatgcggctggccacgccggcgtgcgaacgcatgccgacgccgacgatggaaaccttggcgatgttggtgtcgccgatggcttcgcgcgcgccgatgttggcggcggtctgcttgaggatttccagggcgttcaggtaatcgttgcgatgcaccgtgaaggtgaagtcggtggtgttatcgtgcgccacgttctgcacgatcatgtcgacttccacattggcggcactgatcggcccgaggatcttgaaggccacgccgggggtatcgggtacgccacggatggtcagcttggcttcgtcgcggttgaaggcgatgccggagatgatcggctgttccatggattcctcttcatcatcgatagtaatgagggtgcccggaccctcctggaagctgtgcagcacgcgcagcggaacgttgtacttgccggcgaactcgaccgcccggatctgcagcaccttggaaccgaggctggccatttccagcatttcctcgaaggtgatcttgtccagccgacgggcctgcggcactacgcgcggatcggtggtgtagacgccgtcgacgtcggtgtagatctggcattcgtcggccttcaacgccgccgccagggccaccccggtggtatcggaaccgccgcggcccagcgtggtgatgttgccgttgccgtcgacgccctggaaaccggcgaccaccactaccctgccggccttgaggtcggcgcggatgtgggtgtcgtcgatgtgcaggatgcgcgccttggtgtgcgcactgtcggtgaggatacgcacctggttgccggtataggagaccgccggcacgccgcgcttgatcagggccatgctgagcagggcgatggtcacctgctctccggtcgagaccataacgtccagttcgcgcggaaccggctgctccatgatctggttggccaggccgatcagacggttggtctcgccgctcatggcggataccaccacgacgacgtcatcgcccgcttcgcggaatttcttcaccttctcggccacctgctcgatacgctcgacggtgccgacggaggtccctccaaacttctgtacgatcaaagccatttcaaaccgcctgattccgtgaagggcgcccttttgaacctgccacattctttcgctacccggactggcggggcgcaccgccggccgggcatcaaggggcgctggccgcccggccccgcatcgctctggcgcggggccggcatggcatcagagcccttgctcgacgaagcgctgggccagggccagggcctcgtccaatttcgctgcatcggtgccgccgccctgggccatatccgggcgtccgccacctttgccaccaactgccgccgcggcttgcttcataagctcgccggccttcagttggccggtcaggtcctgggtcacgcctgcgaccagtacgaccttcccgtccagctcgccgccgagcaggatcactgcgcggccgagcttgttcttcaactggtcgaccagcgccaacagcgccttgccgtccagaccatcgaggcgcgcggcgagtaccttcgcgcccttgatttccaccgccgccgccgaaaggtcgtcgccggccgcgctggcagccttggccttgagctgttccagctccttctccagcgagcggttgcgttccagcagggcgccgagcttgtccagcaggttgtcgcggctgcccttgaccaggctggcggcttccttgagctgctcctcggcaccgttcaggtaggccagcgccgccgcgccggtgaccgcctcgatacggcgtacgccagcagccacgccaccctcgctggtgatcttgaacaggccgatgtcgccggtgcgggatacgtgggtgccaccgcacagctcgacggagaaatcgccgcccatgctcagtacgcgcacctggtcgccgtacttctcgccgaacagcgccatggcgcccttggccttggcggtgtcgatatcggtttcctcggtctcgacctcggtgttgcgacggatttcggcgttgacgatatcctccagggccttcagttgttccgccttgatcgcctcgaagtggctgaagtcgaaacgcaggcgctggctgtccaccagcgagcccttctgttgtacgtggtcgcccagtacctggcgcagcgcggcatgcagcaggtgggtcgcggagtggttgagcgcggtggcctggcgtaccgaggcgtcgacctcggccttgaccgcgccgccgacgctcaggttgccccgggcgaccacgccatggtgcaggtgcgcgccgccagccttggtggtatcgcgcacgtcgaagcgcacgccagccgcctcgaggtagccactgtcgccgacctggccgccggactcggcgtagaacggcgtctggtcgaggaccacgacgccctcctcgccctcctccaggcgctcgacggcctggccgtccctgaacagcgcgacgatctgcccggcgccggagacgccctgatagccgaggaagcgggtctcgccgtcgaccttgaccaggctgttgtagtccatgccgaaggcgctggaagcgcgggcgcgctcgcgctgggcctccatctcgcgctcgaagccgtcctcgtcgatggtcagctcgcgctcgcgggcgatgtcattggtcaggtcgaccgggaagccataggtgtcgtacagcttgaacaccacgttgccgggaatcacgctgccctgcagttcggcgagatcctgttcgaggatcttcaggccttgctccagggtcttggcgaactgctcttcctcggtcttcagcacgcgctcgatgtgcgcctgctgttgcttcagctcggggaaggcatcgcccatctcggcgaccagcgctgcgacgatcttgtggaagaaggtgcccctggcgcccagcttgttgccgtggcggcaggcgcggcggatgatccgccgcaagacgtagccgcgaccctcgttggacggcagtacgccgtcggcgatcaggaagctgcaggaacggatgtggtcggctaccaccttcagcgacggcgcgtcgtcgttggcgcagccgatggcctcggcggaggctttcagcaggttctggaacaggtcgatctcatagttcgagtgcacgtgctggagtaccgcgctcacgcgctccaggcccatgccggtgtccacgctcggcgccggcagcgggtgcatgacgccgtccgcggtgcggttgaactgcatgaacacgttgttccagatctcgatgtagcggtcgccgtcctcttccggcgaaccgggcgggccgccccagatctccggcccatggtcgaagaagatctcggtgcagggaccgcagggtccggtatcgcccatcgcccagaagttgtcggacgcatagggcgcgcccttgttgtcgccgatccgcaccatacgctcggcgggcacgccgacttccttggtccagatgtcgtaggcctcgtcgtcggtggcgtagacggtgacccagagcttttccttgggcaggttcagccatttctcgccggtgaggaactcccaggcgtaatggatggcgtcgcgcttgaaatagtcgccgaagctgaagttacccagcatttcgaagaaggtgtggtgccgcgcggtgtagccgacgttttccaggtcgttgtgcttgccgccggcgcgcacgcatttctggctggtggtcgcacgggtgtaggcgcgcttttccaggccgaggaagcagtccttgaactggttcatgcccgcgttggtgaacagcagggtcggatcgttcgccgggatcagcgaactggaagcgacacgggtgtgtcccttctcttcgaagaagcggaggaaggcttcacggatttcagcgcttttcataggttcttccacggaaaattggcggccacgaatcgccggcaaagggccgcattatatcggcccttgggcaaggttgtagtgtatttgcgcgatagttattgcctattgccgaccttttcgcttatgagcgacgaaaggccgcgaaggcatccagtacttgtcctatggactcggcggaaacgtccaggtgggtgaccaggcgcaaacgcgccgccgcgctgatccgcaccccgcgctcggcgaggaagtcgcgcagcgcgaccgcccgctcgccgacatcgacgtagaccatgttggtctgcaccggctccaccgcatagcccagttcgcgcagcccgtcgcccaggcgcgcggcgttggcgtggtcgtcggccaggcgtgccacctggtggtcgagggcgtacagtccggcagccgccaacaggccggcctggcgcatcccgccgccgaccatcttgcgccagcggcgggccttgccgatcagttctacgctgccgcaaagcaccgagcccaccggcgcaccgaggcccttggacaggcacaccgacaccgagtcgaagtgtcgggtgatctcgctggcgtctacgcccagcttcaccgccgcgttgtacaggcgcgcgccatccaggtgcagggccaggccacgcgcgcgagtgaaggcgcgcgccgcggccaggtagtcgagcggcagcaccttgccctgcatggtgttttccagggccagcaggcgggtcctggcgaagtggaaatcgtcggccttgatcgctgccgcgaccttgtccaggtggagcgatccgtcggcctcgccgtcgatcggctgcggctggatcgagcccagcaccgcggcaccgccgccctcgtatttgtaggtatgcgcctgctggccgacgatgtattcgtcgccgcgctcgcagtgggccatcaatccgagcaggttgctcatggtcccggtcggtacgaagagcgccgcggcgaagcccaggcgcgccgccagttcggcctccaggcggttgaccgtggggtcctcgccatagacgtcgtcgcccagttcggccgcggccatggcttcgcgcatgccggcggtgggctgggtgacggtgtcgctgcgcaggtcgatgacaggcacggagggctcctcggttcggcggaaaagcccgatcctacggcgctctaccgacagccacaagggaagtcgggaaatcttcccggccgcaacggaaacggagcgccgaagcgctccgtcatgatcgagagggaaggccgatacgcctcagagcttggccggcaccaccaggattccggcacgcaggccgttcttcacccgtggattggggaagatgatgcgcgcgccgacctcgtccaccacccagcgcgtgccgccgatatcctcggccagcaggtagcccggcgaaagttcggtgaagttggccacgtcgtcgtcgaggtgcaggcggaagtggtcgctgtgcttgatcacctcgcgcgacacgctgaacagcttgaggccgtcgagccgggagccgtccggctgttcctcgctgccgtcgatcagcagctccaggctccgctccaagcgctccaggttgacctcctggttctctccgaacggacgtgccttgcccagttccagggtaaaggcctcggcgccgagctggccgtaggtgtaggcgctgaaggtgatgcccggcttgttctgcaacagcaccgcctcgatgccggcgtcgcgcaggcgggccagttcgctgcgggaatgctggcggccctcggcccaggggtagagggcgaactgctcgatcttcgagccgcggatcgcggtatgcaggtcgtagtgcaggtggactcgctcggtcttgctgaagaacacctgggccaggcgctccagctcggcggcacggaaggcctcgttgccactgccctcctcgtggcgaccgttgaacaggcggttcatgtcctgttcgacgtagcgctcgccgcggcggatggcttcggggttgccgaacaggaagaggaccctggcggcaggcttgagggtgccagcggcgaccttgcggatcagccgttcgagcagttcgatgggcgcggtctcgttgccgtggataccggccgagagcaacaggtcgacgccgttatcgcgggcgccgatcggcgtgacttccagcgcgccctcggccagccagtgcaggcgggtgccgtcggcggtgagctggatcttctcggtcggctcgcggccggccagggtcaagtcgagcagtttgccgagggcgagcatgggatgtcctcagtcagtgggtgtggtcgcagccgcagtcggggccgtgctcgtggtcgtcgccctcttcgatcggctccatctccagttgcaggctgaccaggttggtcgccatcggccgcagcagcaggttggtgtattcggtatcgccgtcttcgacgtcgacgccgatcagcaactggccgttgccggcttgctggacccacacttccttgccctgccagaccacggcgaaacgggtgcaggaagtttccagctgggtgccgtcggtatcttcgaggatcagttgcaggctatcggacatggtggcgaggctctcaatcgagttggaaggaataaaccgagcccagtttaaggatctgcgtcagttcatccaatgccgtccggcactccagcagcagttgggggtcggccaggtcggtctcgctcaggcggtcgcggtagtgccggtcgacccaggctaccagcgtgtcgtacaggccggcgctcatgatcacccccggattcaccgccgccagctcccgttcctgcagcgccacgcgcaagcgcaggcaagccggaccgccgccgttctgcatgctctgcttgaggtcgaagaccttcacttcgcggatcggaccgtcgtcgccggtgagctggtccaggtagttccagacccgcgggttgttccgacactcctccggtaccaccagcagcatcgaaccgtcggccttcgacagcagttggctgttgaacaggtaggacttcaccgcgtcctccaccgcgacctggtcgcgcggcacgcagatggcgcggaagcggccgccgcggcggcccagcttgtcgtgcagttcggcaaggaccttctcggtatcgaggaaggcgtcctcgtgatggaacagcacctcgccattgcccaccgagatcacatcgttgtggaacacgccctggtcgatcaccgccgggttctgttgagcgtagaccactccggcctcgctcagcccgtgcagacgcgcgacggcctggcaggcttccagggtctggcgcgccggatagcgttgcggcgccgggaagcgactgtcgaaggcgctgcgaccgaagacgaagaactccacgccggcatcgccatagtccttgcagaagcgcgtgtggttggccgcgccttcgtcgccgaactggctcactgccggcaacgccgcgtgatgggcgaaatgccgctcgtcgttgaacatcgccgccagcacgcggctggtggtgggatgctcgatggatcggtggaacttgcagttcaggttggccgcggtgaaatgcacgcggccatcggcggtgtcggcactcgggctgaccgtggcggcattggcggtccacatgctcgaagccgagctgcaggcggcgaggagaggcatcgcttccttcgccgcgcggcggatcacctcctcgtcgctgccggagaagcccaggctacgcagcgcagcggtatccgggcgggcttgcggagcgagtaccccctgcttgaaacccatctccatcagcgccttcatcttcgccaggccctgcttcgccgcttccttcgggttggacaccgcctggctgttgctttgcgaagcgacattgccgtaggacaggccgccgtagttgtgggtcgggccgaccaggccgtcgaaattcacttcatgggcattcataggctgatcccgggagtcagggtggcaggaagggacacgctggggctttccagcgaggcgaccggataggcgcagtaatcggcggcgtagtaggcgctcggccggtggttgccggacgcgccgataccgccgaacggcgcgctgctggcggcgccggtgagctgcttgttccagttgacgatgccggcgcggctttccacgaggaactgctcgaaacgctcgcgggaatccgacagcaacccggcggccaggccgtactgggtggcgttggcttcacggatcgccgcagcgaaatcggagtagcggatcacttgcaacagcggcccgaagaactcttcgtccggtcgctcggccaccgcgctgacgtcgaggatgcccggggtcagcagggcggcgccgtcgatcggctgggtcatcgccagcagcggctgtgcgcccttgccgatcaaatgctcctggtccttgagcaggtgctcggcggcgctcagcgaaatcaccgcgcccatgaacggcgccggctgttcgtcgaagcgaccgacccgcagggtagcgctgaccgccaccaggcgcgccagcagtgcgtcgccccaggcgccctgcggcaccagcaggcggcgggcgcaggtgcaacgctggcctgcggagatgaaggcggactggatgatggtgtagacggcggcgtcgaggtcggcgacctcctccaccaccagcgggttgttgccgcccatctccagcgccaggattttctgcggctggccgccaaactggctgtgcagcaggttgccggtgcgactggacccggtgaagaacagaccgtcgagccctcggtgggcggccagcgcgacgccggtttcgcgaccgccctggaccaggttgagcacgccggccggcaggccggcctggatccaggccttgagcgtcagctcggcgaccttcggggtcagctcgctgggcttgaacaccacgcagttaccggccagcagcgccgggacgatatgcccgttgggcaggtggccggggaaattgtagggaccgaataccgccaccacgccatgcggcttgtgccgtagcacggcggtagcgtcggccagcggaccggatttctcgccggtgcgctcgcggaacgcctgcaccgagatcgccaccttgttgaccatgctggtcacttcggtggccgactcccacagcggcttgccggtttcctcgccgatcactcgggccagctcgtcggcgcgggacttgagggtcgcagcgaagcgctcgagcaactcgatgcgctgctccagcgggcgccgcgcccaggccgggaaggcctcgcgggcggcgcacacggcagcgtcgacctgggtggcgtcagcgccgcgcccggaccagaccacgccctggccaaccgggtcgagggactccagggtctcgccctggcccgccagccactggccggcaatgtaatgggtactcatcatcgactcctcgggcgccctcgccgggacgcctccatcaggctttcaaccgcgcttctgcgccgacagcggcaccgcgcgtaccgaggcgccggccgacaggcgcaggcgcttggcagtcagcggatcgaccaccagggtgccggcggcggcccgcgccggcgcggcggtgatgcgacagtcttcgcgcttgcggttgtggatcaggtagggctcggcgtcgtcgccgggagtgcccaccgccagcaccaggttctggctctcggcgatggcgcggatcttgtcggtctcggcctcgatcgccgggccggcgtcgaagatgtcgacgtagccctggtagctgaagccctcggccttgagcatggccagcgccggctcggtgttcggatggacgcggccgatcaccccgcgcgcctcctcggagaggaagcaggtatagagcgggaacttcggcatcagctcggcgatgaaggccttgttgccgaccccggtgaggtagtcggcctgggagaattccatcttgaagaagtgccggccgaggctttcccagaatggcgaacgcccctcctcgtcggacatgccgcgcatctcggcgatcagcttgtcgccgaacaggtggcggaattcggcgatgaacaggaagcgcgcgcgcgacagcagcttgccgttgaggccgctgcggtggtcggcgtggaggaacagcgagcacagctcggaattgccggtcaggtcgttggccaggaacagcgtggggatctcgcgatggatgttgagttcctgcgaggcgctcacggtgaggccgacccggtagttgtaccagggttcgcgaagccccaccgctccggcgatggcggagatgccgacgaccttgccggcgtcgtcctcgaggacgaacaggtagtcggcgtcgccgcgttcggcctcgccgcggaaggccttctcggcccagctgacgcgatgctgcaggcgctgctcgttggccggcagggtggtcaggccggtgccggtgctgcgcgccagctcgatcagggccggcaggtcggcgctggtaacaggacgtacgatcatgactggctccttcagaccgctaccaggcgcacgctggcgccttcgccgacgcccagggcctcggcggcttcaacactcagggccaccggcttgccgggcgcccagtccaggtccagcacgaccgcgcggaagtcctgcaactggccgttggtgaccaggtatggacgcccgctcttcggcgcctcgccgatcttcaccggaaccacccggctctgggcgatcgagcgaatccccgaggtacgcgcgtgcagggtcgggccgccatcgaagatgtcgatgtagttgtcggtctcgaagccttcgcgcatcaggatatcgaaggtgatctgcgctcgcgggtggacctggcccatggactcctgggcggcatccggcaacagtggcacatagatcggatagtgcggcatcagttcggcgaggaaggtgcggctcttcagcccggagagcttttccgcctcgatgtagttcaggtcgaagaagttgcgcccgaccgcgttccagaacggcgattcgccctgctcgtcactgtagccgacgatctccaccaccaccgcgtcggcgaagcgctccggatggctggccatgaacagcaggcgaccgcgcgagttgagttcggcatagacgctctgcaccaggtcgcgctgtacgtagaaactggtcagcaggctgttgccggtaaggtcgtggcacagcgagaggacatggatcttgttgtggatcgacagcgagcgcgaggcgtgcacgaaggtttcattgcggaagctgtagaacggttccgagaacccggccgaggcgacgatcgccgagcagccgaccagctcgccgctggcgctgtcctcgaggacgaagaaatagctttcctcgccgttgtagctcacctccgcggcgaacgaggcctcggaagcgaggatcttgtcgcgcaggcgttcggcgtcatccggcaaggacgtgacgcctaccgggctgtccgccgccagacgctgcacctgtggcaggtcggccgcttgggcggggcgcatcaccaacatggcgtcactcctttctcagacaacgatgattgccgcatccatgcgcgggaccgcggcaccttcctgtgccacggtttcgaacgtccagcagggaagatcccgcgccacgcacggcggcacggttcccggctccggcgcgggccgctccgggatgtcgcatcgggtgccccggcctgcgccggggccccgtgggttcgctcagccgcggaccagcttggccacggcgcgctcgaagcgctccaggccttcgtcgatctcggcgtcgtcgatcaccaggctcggcgcgaagcgcaccacgtccgggctggcctggagcaccatgaccgcctctttctcggcggcgttgagcacatccctggccttgcccttccactcgtcggtcagcgccgcaccgatcagcaggcccatgccgcggatctcgtcgaagatgccgtactcctggccgatcttctgcaggcgggacttgaagcgctcatgcttggccttcacgccatccagcacttccggggtattgatcacgtccagcgccgcctcggccaccgccgacgccagcgggttgccgccgtaggtggtgccgtgggtgccgaccgacaggtgcttggcgatctcgccggtggtcagcatcgcaccgatagggaagccgccgcccaggctcttggcgctggagaggatgtccgggaccacgccgtagtgcatgtaggcgaacagctcgccgacccggcccatgccgctctggacctcgtcgaagaccagcagcgcgttgtgctcgtcgcacagcttgcgcgccccttccaggtaggcctgctgcgccggcagcacgccgccctcgccctggatcggttccagcaccacggcgcaggtcttgtcggagatcgccgccttcagcgcttccaggtcgttgtagggaacgtgggtgataccctcgaacttgggcccgaagccatcggaatacttcggctggccgccgacgttgacggtgaacagggtgcgcccgtggaagctgttgctggcggcgatgatctcgtacttctgcgggccgtagacatcgttggcgtagcggcgagccagcttgaaggccgcctcgttggcttcggcgccggaattggcgaggaacacccgctcggcgaaggtggcgtccaccagcttgcgcgccaggcgcagggccggctcgttagtgaagacgttggaaacgtgccagatgcgctgggcctgctcggtgagcgccttgaccagcgccggatgcgcgtggcccagggaggtcacggcgatgccgccggcgaaatcgatcagttcgcggccgctctggtcccagacgcgcgatccctcgcctcgcaccggaatgaaggcggcgggggcgtagttggggaccatataccggtcgaaatcggcacgttctacctgcgcatggggagcggacatcggtgtttctcctgcctgaaggcggctatcgatgaaaggattgtagggattgggaccgggccggcattgccgccatgcgacaacttgttatagcgccaacccgggaatttccgcggctttcggaaatgcgacagaaagcatcgggaaggcgcagtgtaaacgcgcgatgcactcgggtgcatacttcttctacgccgccccgcgggcgggaacagcagggaaacaagccatgcccatcgagggaatcgactaccgtctcgtcttcgcctccgacgtcaatccgcgcgacggcctcggcctggagtgctggcgcggcgaacagccgctgttcgaggtctttcgcgacgacgtcggccggcgtttcgtggtcaacctgttcgccagcgacgttccgctggaactgctggaggcgatcattccgacggcccgtcgcgaactcggcgacttcccgaggcgatccgcctcccggggcgtcgcaaagcccggctgaaaccgccgcgccgttggcgatcagccgcgttcgacgggagtgaaggtcgtctcgaaggcgctgccgccgcgccgctggttgcggtcctcgcgcggagtgacgccgaagaagttgcggtaggcgctggagaaatgcggcccggaagagaaaccgcaggacaggccgatctggatgatcgacttgctggtctgcatcagcatctgccgcgcgcggttcaggcgcagctccaggtagtactggctgggtacgcggttcaggtattgcttgaagatccgttccaactggcgccgcgaaacacacacatgctgggcgatctcgtcggtggtcagtggctcctcgatattggcttccatcagcagtaccgcctgggtcagcttcggatggctggagccgaggcgattcttcagcgggatgcgctggcgctcgttgccttcgcgaatgcgctccaccaccagctcctccgagaccgcgccggccagttcagcgccatggtcgcgggacagcagcgccagcagcaggtcgagtaccgccatgccgccgcaggcggtcatgcggtcgcgatcccactcgaacaggtgattggtggcgatgaccttggggaagcgctcggtgaagtcatcgtgccaacgccagtgcaccgcggcgcgatagccgtcgagcaggccgagctgggccagcgggtagatgccggcggacagcgcgccgatcgccgctcccgaacgcgccagttgcttgagcgccaggcccagcgctggcgacaccgccgccagcgcctcgtcggcgaccaggaacagccgcgagcattgctccagcctgccgttccaggccgttcccggcaggcgccagccctcctcttcggccggcgcttcggcgagcaggaacagcggctcgtagagcgcctcggggtgcaaccgccgggccgcccgcagggcttcctcggcaagcgatagcgtcagcgcgcgggtggcgggccagaggaggaaaccgatgcgttggggttgggcagtcatgggagcagcttagccggcctctgcgatgaatgttacttgaggctgccggagaggaactgcttgaggcggtccgactgcgggttggcgaggacttccttcgggcagccgtgttcctccaccaggcccttgtgcaggaacaccaactggttcgacacctcgcgggcgaaacccatctcgtgggtcaccaccaccatggtgcggccttcctgggccaggtcctgcatgaccttcagcacttcgcccaccagttcggggtcgagcgccgaggtcggctcgtcgaacagcatcacttccggctccaccgccagcgcccgggcgatcgccacgcgctgctgctcgccgccgctcatgtgcgccgggtaggcgtccttgcggtgcgccacgccgaccttggccaggtagtgctcggccttctcgatggcttccttcttcgacacgccgagcacatgcacgggcgcctcgatgacgttctccagggcgctcatgtgcgaccacaggttgaaatgctggaacaccatcgacaggcgcgagcgcatgcgctgcaactggcgggagtcggcggccttcagcgcgccgtcgcggccgggcaccagcttcagctcctcgccgttgagcaggatcttgccggcgtgcggctgttccagcaggtttatgcagcgcagaaaggtgctcttgccggaaccgctcgagccgatgatgctgatcacgtcgcccgctttcgccgccagcgagacgcccttgagcacctcgtggctaccgtagcgcttgtgcaggtcttggacttccagtttgtacatgtgtgtgttctcggctaatcagtcgctgagcaagcgtccctgacggatcggttgacgaccggccaccttggccagccagagtcccggctgcgcgtagcgcatccgttcgatggcgaaaagcacgccggaaaccccggcgcacacggtgctggcacggtcggccaggggatcgatgacctggaacagcggttcgcccgcctccacccattcgcccggccggcgcaggaaactcaccacgccggtatgcggggcgtggacgtattcggtgccctcgaagggcaagccttcgcagcaggcttcgggcgccgccggccattcgccctcgacgaagccctgctcggcgaggaaggccaggatcgccgcggcgttggcctcggcctgctgcacggtggtgtcggcctggccgccgagttcgacggtggtcgccaggcaggccagcggcagctcggcgcgcggatacaggcgcgacaggcgcagccacggcaccgagcaggcctcgtcgaaggaaccgccgccggactcctcggcgagcagcccgacagcggcgcccaggcgtgcggccagggaggcgaaggcgggccattgctgcggcagggtatagagatggatggcggcctcgaagtcgcaatgcaggtcgagcaccaggtcggcgtcgcaggcgtggcgatacagcaggcgctgcatgccctccagttccgaggtcgccggcggcagggcgtccagcgccgcgcgcagggcctggcggaccagcgcgacattggccgccggatcgctgccgagacgctcgccgacgctgtcgatcaccgcgtccagcaggtcggggaagtcgcggttgaagttgcgcccgctgctcatttcgaagcgtccctggtgcagcgcctggatcatctgcccgagaccgaccggattggccaccggcaccagctcgacggtgccgcgcaggcggccttccgcctccagcaggcgcaaccgctgcttcagctcccaggcggtgcgcatgcccggcagctcgtcggcgtgcaggctggactggatgtagaccttgcgcgcgccgcagccgaagcggaacacgctcaggcgcttctcgcttcccagggtgctccacggcagcaggtggtcgatacgctccatgcggtcctccggatcaggatttgcgcggcgccaggtaggccagccagcggcgctcggcaagcttgaacaggcgcaccaggatgaaggtcaggcacaggtagaacaggccagcggtgatgaacgcctcgaacggcaggtagtactgcgagtagacggtccgcgcggcgccggtgatgtccaccagggtgacgatggacgccaggctggtggtctgcagcatcatgatcacttcgttgctgtactgcggcagggcgcgccgcagtgccgacggcaggaggatgcggcggtacatcttcaggcgcgacatgcccatcgccttggccgcctcgatctcgccatggggcgtggccttcaggctgccggcgaggatctcggcggtataggcgctggtgttgatggcgaacgccaggcaggcgcagaaggaggcgttcgacaaccagggccacagcgcgctctcgcgcaccgcgtcgaactgcgccaggccgtagtagatcaggaacagctggaccagcatcggcgtgccgcggatcacgtaggtgtagagccaggccgggaagttcaccagcggctgcttggagacccgcatcagcgccagcggcaccgccagcagcaggccgatcagcagggagatcgagagcagcttgagggtgaccagcaggccgtcgaaatagagcggaaggctgtcccagatgacggagaaatcgaagatcacgatagggccccttgactcacagttccgcggttttcacgccgaccgaatagcggcgttcgagcaggcgcagcaacagcagcgacacgctggtcaccagcaggtacaggccggccacggcgaggtagtaggtgaacggctcgcgggtcgcatcggaggcctgcttggccttgaacatcatgtcctgcaggccgaccacggaaatcagcgcggtggccttgaccagcaccagccagttgttggtgaagccggggatcgccaggcggatcatctgcggcacctggatgcggaagaacacctggcggtggctcatgccgtaggcgtagccggcctcgccctgccccttgggaatcgccatgaaggcgccgcggaaggtctccgagagataggcgccgaagatgaagccgagggtgccgacgccggacacgaagggattcaggtcgatgtagtcgtcgtagccgagttgcggggcgacccagttcagcaggccctggccgccgtagaagatcagcaggatcagcaccaggtcggggatgccgcgcactaccgtggcgtacaggtcgccgcaccaggccagccagcgcaccggcgacaggcggaaggccgcgcccagcaggccgaggacgatggccaggagcatggaaagcagggccagctggagagtcagccaggcgccatcgacgatggtcgcaccgtagccagtgatcatcaaaacggtacctctatgcagctaatgcagcgctaaagcagtggcgtccagtcaataaaaaagtggcacaaacagcgcgaggcgtcgcggacgtttgtgccacctctgacggatagcgtcagttcgaaccgtagacgtcgaagctgaagtacttgtcctggatctgcttgtacttgccgttggcgcgcagcgcgtcgatggccgcgttgaacttgccggccagctcgctatcgcccttgcgcacggcgatgccgacgccttcgccgaagtacttggcatcggtcagttgcggaccgacgaaggcgtagcccttgccggcatcggtcttgaggaagccatcttcgaggttcaccgaatcggcgaccaccgcgtcgaggcgaccggccaccaggtccatgttggcttcctgctgggagttgtagcgcaccacttcgacgccggccggggtcagttcggcggaggcgtagcggtcggcggtactgccacgcagcacgccggccttcttgcccttcaggtcggccttgggatcgttgaggctggcgccttccttcatcacgaagcgcgccggggtgttgtagtacttgttggtgaagtccaccgaacgcttgcgctcgtcggtgatggtcatcgacgagaggatcgcatcgatcttgcgcaccttgagtgccgggatcaggccgtcgaactcctgctcgacccacttgcactgcaccttcatctcttcgcagagggcattgccgatatccacgtcgaagcctgccaactggccgtccggggtcttcagcgagaacggcgggtaggccgcctcgatgccgatgcgcaccggcttgtcggcggcgaaagtgggcagggagagcacggacagcgccagggcgccgagaagtgcgagcttcttcatctggaactccttcgaaggggatggcatcgattggcaggagaaatagaaccttgcccaggctgccgacggatatgcgtgatcaccggctcttgcgcatggcgccttctcgtggacagggcgccagctggggtgagcggcattctagcgacaggccgaaagtggttatttcttcaatgcgacaactaattataaaagcaccgaagagggcgttcggcgatattgacaggcagcgacatttgtgcccggaaagcgcgaagtgtaatcaatgagtaaagcaaatctcaagccataaattgccaattccttctccttcaatggcttggccgctacgactcgcctcgactgctaccccgtgtcgcaccttggctgtgcgtggcgtttcctctcgccccaattatgcgcaggcgcgcatcaccgaagtgttaccgccgccccattcccggcgcgagcccattcgaaacgccctcctcctcggcccgcgccaaatgaaagaccccgcgcggctcgcaccgcgcggggtcgtttcggatcaggcggaagtcaggcggcctgcatcgagcgatgggtctcgatcaggtgctggaccacgcccgggtcggcaagggtggagatgtcgccgagggtgtcgtactcggccgcggcgatcttgcgcaggatgcgccgcatgatcttgcccgaacgggtcttcggcagtcccggcgcccactggatcacatccggcgtggcgatcggaccgatctcgcggcgaacccattgcttcagctcctggcgcagcgcctcgctcggctcgaccccggagttgagggtgacgtagacatagatgccctgccccttgatgtcgtgctgcatgccgaccaccgccgcctcggcgaccttcgggtgggcgaccatcgcgctttccacctcggcggtgcccatgcggtggccggagacgttgagcacgtcgtcgacccgcccggtgatccagtagtagccgtcctcgtcgcggcgcgcgccgtcgccggtgaagtacatgcccttgaaggtcttgaagtaggtgtcgacgaagcggtcatggtcgccgaacagggtccgcgcctggcccggccaggagtcgaggatcaccaggttgccctcggcggcgccctcgatcaggttgccgaggttgtccaccagtgccggtaccacgccgaagaacggcttggctgcagagcccggcttcatcgcgtgggcgcccggcagcggggtcatcaggcaggcgccggtctcggtctgccaccaggtgtcgacgatcgggcagcgcgactggccgacggtctcgtagtaccactgccaggcttccgggttgatcggctcgcccaccgaaccgagcagacgcaggctggaaccgtcggcaccggccaccgccgccttgccttcggccatcatcgcgcggatcgcggtcggcgcggtgtagaggatgttgaccttgtgcttgtcgatgattttcgccacgcgggtcacgtcggggtagttcggcacgccctcgaacagaatggtggtggcgccgttggccagcgggccatagacgatgtaggtgtggccggtgacccagccgatgtcggcggtgcaccagtagacttcgcccggacggtagtcgaagacccgctcgtgggtcagcgaggcgtacaccaggtagccgccggtggtatgcagcacgcccttcggcttgccggtggagccggaggtgtagaggatgaacagcgggtcctcggcgcccatttccttgggtgcgcaagtgctgccggcaaccttcatcaggtcgtcgtaccagacgtcgcggtgctggttccacttgatctccgcaccggtacgcttgcagacgatgatcttctgcacgctggaggtttccgggttggtcagggcgtcgtcgacattggccttcagcggagtgcgcttgccgccgcgcacgccttcgtcggcggtgatcaccaccttcgacttgcaatcgatgatgcgcccggccagggcctcgggggagaagccgccgaagaccaccgagtggatcgcgccgatgcgggtgcaggcgagcatggcgaccacggcctcggggatcatcggcatgtagatggtcactacgtcgccgcggtgcacgtcctgcccgcgcagggcgttggcgaacttgcagacctgctcgtggagctggcggtaggtgatttcctggtggtcggcgggatcgtcgccttcccagatgatcgccacctggtcgccgcgttcggcgaggtgacggtcgaggcagttgtgcgacacgttgagggtgccgtcggcgaaccacttgatgtccacgtgatggtcgtcgaaggaggtctgcttgaccttctcgaacggcttgatccagtcgatccgctgggcctgctcgcgccagaagccgtcggggttgacgacggactgctggtacatcgtcttgtaggtggcttcgtcggtgaaggtccgtgccaccgcttccgggtgcacggggtacagggatgccgcagacatggctttaacctcggtacgtgagtgttgtttttgttgtgcccagttgtagcgagcgcacaccccacgaaccatacgaccatggtcttaccactgcgcgacagcgccgatcgtagctataagccgcgccgatcgtagccttgcaccgggcggcggagcgcgtcccgcgccccgccgtcgcgacctcagctcatacccagcaggcccggcagccacagcgagatcaacggcacgtaggtcaccaggatcaggaacagcagcaggatcatcagccacggcagcgccgcgcggatggtcgcccccagcggcatgccggtgaccgccgaagtgacgaacaggttgaggccgaccggcgggtgtaccaggccgatctccatgttcaccaccatgacgatgcccaggtggatcgggtcgatgcccagcttcatggcgatggggaagaagatcggcgccaggatcagcacgatcgccgagggctccatgaagctgccggcgaccagcagcaccacgttgaccatcagcaggaagccgatcggggtcaggccttcctgcaccacccattcggtgatctgctgggggatctgctcggtggtcaacacgtgggcgaagagcatggcattggcaatgatgaacatcagcatgatgctcagccgccccgactccagcagcaccttgggacagtcgcgcaggcgcatgtccttgtacacgaacagcgcgacgaaggccgaatacaccgccgccaccgccgccgcctcggtgggggtgaacagcccggaatagatgccgccgaggatgatcaccagcagcaacaggccccagcctgcacggcgtgcggcggccagccactcgcggaagctggcgcgcggctgcgccggcagcttcttgacccgcgcgacgatgtagatcaccaccatcaggatcaccccgagcagcagccccggaaccaccccggcgacgaacagcttgcccaccgaggtctcggtggcggcggcgtagaccaccatcacgatcgatggcgggatgaggatgcccagggtcccggcattgcagatgatccccgcgccgaaggcgcgcggatagccggagcggaccatgccggccacggcgatcgagccgaccgccgccactgtcgccggcgacgaaccggacagcgcggcgaacagcatgcaggcaagcaccgcagcgatcgccaggccgccgcggatatgcccgacgcaggcattggcgaagtcgatcaggcgccgcgccacgccaccggtggtcatgaacgcgccggagagcaggaagaacgggatcgccagcagggtgtaggcctcggaggtctcgaacagcttgatcgccagcgagcgcaccgaatccgggctgaacagcaggatcgtcagggcgccggacagccccagggagatggcgatgggcacgccgatgaacatgaacaggaacagcagcaggaacaggatcagcacggtcatggacggttctccccggcctcttcgccggccagtttggaggcctcggcggcctcgtcggcgaggcccagcccgagctggcgaccgcgcaacaggttgacgaggatttccaggtagcgcagcagcaccaggccgaagccgaccggcaccaccaccgcgatgtaggcctggaggatgccgaagtggtcgaggtcctcggcgccgatgccggcgacgaacagggtcttcacccagtcgtagctggcgaccatgaacagcccggcgtagcccaggcagcagaggcaggcgagtatcccgatcaggcgctgcaagggacgcggcgccaggcgcaccagggcatccaccccgaggtggccggcggtgcgtacgccgtaggcgatgccgaggaagatcagccagccgaacagcgccttggtcagcgcgttgctccaggacatatcctgggctaccccgaggatcgcgtcgcccatcgagtacagcggagcccgcagtgtcggcaggcggtcgccgaggtcgtagaacagggtgaagacgttggtcatcaccacatagaggaaggtcaccagcgtcatcgccgccagcaggaaggcgatagcgccctcctcgaagcggttccagacgcgcacgagtcgattcatcgcagcgttctccacaatgccccgcccggccgggcggggccggacgggtcaatcgggacggttggaggcttcggcggcctggagcaggtcagcgccgacattgccgcggaatttctgccataccggctgcatcgcctggcgccagtcggcgcgctgctgcggggtcagggtatggatctcgctgacgccactggcgaggatgcgctggcgggcgtcgcggttgaggcgctcggcctcgaggttcacctgcacggtgacctcgtccatgatccgctgcagcgcttcgcggatgtccgccgggaggccgttccagaacttcgcgttggtgatcaccatgtagtccaccaggccgtggttggactcggtgaaatacttctgcacctcgttgaccttctggctctcgtagttcgaccaggtgttctcggtgccattcaccacgccggtctgcaagccctggtagacctcggcgaaggacatcttccgggagatcgcgcggagctggcggaactgctcgttgagcacgtcggacgcctgcacgcggaatttcagcccgcgcgcgtcttccggctccagcaacgggcgattggcggagagctgcttcatcccgttgtgccagtaggccaggccgaggatgcccttgccctgcatgctggtcagcagggcgtgcccctgcgggctgcgctggaagcggtcgaccgcctggatgtcgtcgaagaggaacggcaggtcgaagatctgcaccttgcgcgtgtactgctcgaacttggccagggacggcgccagcatctgcacgtcgcccagcagcagcgcctccatttccttgccatcgccgaacagcgacgagttgggatagacgtccacctcgacccggccgcccaggcgctgttcgacgagcttcttgaacagcagcgcgccctggcccttgggcgtgttttccgcgaccacgtgggaaaacttgatgacgatcggctgcgcggcattcgccaggcaggagccaccgatcgccagggcgcacaacagcgcccgtaccatcgtcttgaacatttcgtgacctcagattgttgttgtgctttcgaggtatcgacgagcctgacgcagccggcgcgttcggagaattcgccattgctcaagcccgcgttcgcgtctgtcgaacgcgttcagccaccctccccggcccgctccagcaggcgtcgcgcgcgtcccagcaccggcgcgtcgaccatctcgccgtcgaccacgaagacgccggcaccggaggcgccggcctctgccacccgacgcgcccactccagttccgcgagactcggcatcaatgtctggtggatcggctcgacctggctcggatggatgcacagcaacccgccgaagcccatgtcgcgagcgaagcgcactgcctcgaccagtccgacacggttctggatcgccgggtagacgccgtccagcggcggcgccaggcctgccaggcgcgattgcaggagcagcgcgtaacgggcgtgaccgagaatctgttcggctgcgttgctgccggtgttgagatcgagatccagggccaggtcgaggctgccgaaggacagccgctcgacccccgcggcggcggcgatctcgcccagcgcggcaaggccgcgggcactctcgacgatgggccagaccggcttgccgctggccacggcggcgtggcgcacctgggcggcgctctccactttcggcaggagcaggccgatcactccggcgtggtcgcggcacagcgccaggtcgtcggcatgtccgggatgctccgccgcgttgatccgcaccagcacccgggcttccggcgtatcgacgaggaaacgccggagattggcccgcgcctcgaccttcagcccctcctccaccgcatcctcgaggtcgacgatgacccggtcggcgccgctggcaagggccttggggatccgctccgggcgggtcgccgggacgaacagcgcgctgcgcacgatctgtcggttcatgtccgcctcctcataccgttccggtcgcgcgcaggcgctggatatcggccgcggtacagcccagttcggcaagcagcgcgtcgctgtcgccgcccagcgccggcaccgcatccatgcgcggaacgaaggcgctgctgctggccggcggcaacaacgccggcaggcgcccggccgggctgtcgatggaggtccagcgttgccgcgcctgcaactgcgggtgcgcccagaccccggccatgtcgttgacgtgggcgttggcgatctgcgcctgttccaggcgcgccaccacctcggcggccggcaagacggcgaaggcttcgacgatcagcgcacgcagctcctcgcggttggccgagcgcttgaagttcgccgagaagcgttcgtcgtcggccagctccgggcggcgcaggaccttgtcgcagaaggcccgccactcgcgctcgttctgcaggccgagcatcaccgtgccgccgtcgccggcggggaatggcccataggggtagatggtcgagtgcgaagcgccggcgcgcggcggtggcggcgcgtcctggtaggcgtagtacatcgggtagcccatccactccaccaggctctccagcatcgacacgtcgatgcggctgccctcgccagtgcgctcgcgcagcagcagggccgagaggatgctgctgtaggcgtacatgccggcggcgatatcggcgatcgaacagccggccttggccatctcgttcggcccggcgccgccggtcaccgaaaggaagccgccctcgctctggatcagcaggtcgtaggccttcttcttctcgtagggaccgccttcgccgtagccggagatatcgcagacgatcagtcgcgggaagcgctcgcgcaacgcctcgtaggacaggcccaggcgcgcggcggcgcccggcgcgaggttctgcaccagcacgtcggcgccggccagcagcttctccagcaacggcagcgcctcggcctgcttgagatcgaggctgaggctctgcttggaacgattggtccagacgaagtgcgacgacaggccgttgacccgctcgtcgtaaccgcgggcgaaatcgccgacgccggggcgttcgatcttgatcacccgcgcgccgagatcggccagttggcgggtgcagaagggcgcggcgatggcgtgctccaggctgaccacggtgatgccgtcgagcgggcgcggctggtgggattgcgtcatgggtcggactccctgccctcgtccgtcgaagacgaggtgcggctggttcggttgttcagatcaggggcgttacggaaggcgcctgacgcaggccccaggcccgctggataaggatctccgcctcggcgccggtggccgcgccggaaaacgccagcaggcggcggaacttgtcggccagctcgtcgcggctgagggtattgccgggatcgcccttgggttcgtcgatggcggcggtatggcgccgcccttcgcgatccagtacttcgacccgcccgagccagcgctgcggataggcggcgtcgacctccgggtccaggcgcatctcgacccgctcgcagaacgcagcgacccgtgggtcgctcagcgcatgccgatggaactcgccgaggccggccttgccgtacacggcgatcaggcccagcacggtgcccatggagaacttcgcctggtgcacggtctgcggctcgaccacccggccgagcacgtcgatggcgccctggtggacccgcgcggtgaccgcggcgatctgcgagtgatcgagcccttcgcgctgcatcagcgccagcagcgcgtcggccgcgggatgggtatggcggcacgaggcgtggaacttgaacgaggtttccagcaacgcccagcggctgccgaggcgatccaccaggcgctcggggtcggcgtcgctggacatcccggcggccatcccctgctcgccttcgaggatgtgtcgcgcgccgctcaggccgtcggcggtgagataggcggcgagcagcccgtcggcggcggccttggcggtatgcaactgcttggaatcggcggcgtcgcggaggaactcccagagcccggcggcctgggttccggcgctgccgagcaggtcgacgaagcgctcgcggtcgaagtccatcagcttgcccaccgccactgccgcggcgagggtgccgaccgtggcagtggtatggaacacccggtagtgggaacggccgaggaattcgccgatgcggatgccggcctcgtagccggccaccgccgcgaggatcagctcggcgccgctgcggccgaggtcctgggccgcggccagggcagcagggaagaccaccgccgcggggtgcagcaccgagctgttgtgcaggtcgtcctgctccaccacgtgggaagccgcgccgttcaccagggcggcgaaatacggcgagctgcgccgccgactgggcaggatctgcgcgctaccgtcggccgggcccatgcgttcggcgtagcgctcgaacaatgggatcggatgctggcccttgccggccagcgccgagccgagccagtcgaggaacaattcttccatccgcgccaacaccgccggcggcaggtcctggtagcgcaggccggtgagaaagccggcgagttgctgggtgtagtcggtcatgaccaacgctctcttgtagttgtcccgaggcacgcggcctacagcgggttgctcagttcgatcaggttcaggtcggggtcgcgcaggtacagcgagaggatcggcccgccggcgccggtgcgctgcaccgggccctcgaggatttccacggcctgctggcgcagttgctcggccaccgcctcgagtggcgtggcgacgatgaaacagaggtcggcggaccctggcgtaggtcgctcggccttgggttcgaattcgcccccggcctggtgcaggttgatcttctgcgcaccgaaggcgagggccttgcgacccgcgccgaaggtaacggcgcgcatgcccagcacgcgggtgtagaaatcgatgctggcgtcgatgtcgcggacggtgagcaccaggtggtcgagacggtcgatctgcatgggcggctcccgcttcagaacgagcgcggcagttcgagcaggtgctcggccacgtaggacaggatcaggttggtggagatcggcgccacctggtacaggcgggtctcgcggaacttgcgctcgacgtcgtactcgcaggcgaagccgaagccgccgtgggtctgcaggcaggcgttggccgcctcccaggaagctttcgccgccaggtacttggccatgttcgcgctggccccggcgttgagcccggcgtcgtactcctggcaggcgcgccagcgcatcaggtcggcggcctccacttcgatgtgcgcctcggcgatggggaactgcacgccctggttctgccctatcggccggccgaagaccacgcggtcgcgggcatagtggctggccttgtcgatgaaccagcggccgtcgccgatgcattcggcggcgatcagggtgcgctcggcattgaggccgtcgaggatgtagcggaagcccttgccttcctcgccgatcaggctatcggcggggatctccaggttgtcgaagaacagctcgttggtctcgtggttgaccatgttggcgatcggctgcacggtcaggcccttgccgatggcctcgcgcaggtcgacgaggaagatcgacatgccttcggacttgcgcttcacctcggccagcggcgtggtgcgcgccagcaggatcatcaggtcggagtgctggatccgcgagatccacaccttctgcccgttgatcacatagcggtcgcccttgcgcacggcggtggtcttgatcttggtggtatcggtgccggtggtcggctcggtcacccccatcgactgcaggcgcagctcgccgctggccagcttcggcaggtagaagcgcttctgcgcctcgctgccgttacgcagcaacgtgaacatgttgtacatctgcccgtgcacggtgccggagttgccgccgcagcggttgacttcctccaggatcaccgaggcctcggccaggcccagaccggaaccgccgtactcctccgggatcatcgccgagagccagccggcgtcggtcagggccttgacgaaggcctcgggaaaaccgcgctgctcatcgatgcggcgccagtaggcggcgtcgaattcggcgcagagggcacgtacgccctcgcggatcgcgttcagctcttcgctgttcggattcatcggtgactcctcgattcttgtcgttggatgggcgctggggccctttcagtcgaattccacgtcgccgcgctgggccaggccggcgccattgccgacccatacctcggccttgccggcagcgagcaggcggccgccgacctcgaacggctcgggacagatcagcgggcgcaggccgcgataggcgaagcgacgcaggcgcgcctgcggattggcccggcagaacgcgcgcagggccagggtggcgatcagcggaccgtgcaccaccaggcccggatagccttcggcatcggtgacatagggccagtcgtagtgaatgcggtggccgttgaaagtcaccgccgagtagcggaacagcaacaccggatcgggctccagcgcctcgcgccagtcgccctcgggcaaggcctcggtaccgccgagcttgggcggggtcggttcgcggtagacgatgtcgtgctcttcgctcagcgccagttggccgtcctggcggtagtcgtggcgcagggtgacgaacagcagcgcgccgctgcgaccgtgcttctcctcgacccggaggatggtcgaggtgcggctggcctcgccgccgacccgcagcggctggtggaactccaggcgcccgccggcccacatgcggttgcgatcgtccgccggcggcaggaaaccgccgcgcgccgggtggccgtcgacgccgaggccggcggcctccaccgggtcctggaagaacgcccagtgccagagcggcggcagcgcttcgccgtgggccggggtcggctcgccgaaggtggcggcgatgcgcttgaccaggttgcggctcaattgatcgtgggtttcttcctggcgaccgatccagggggcgaaagcggactcactcatgcgtggcttcccatgacctagggggtgatgggaggagaatgataggatgctagcgttttgagaatttgcaattacgcaatggcgcgttcggatttgccgaacgccatggagtgcctatgcatttcgatctcgccgacctgcgcctgttcatccatatcgccgagtcgcccagcctgacccagggcgcgcgccgcgccttcctttccccggccgccgccagcgcgcgggtcaaggcgctcgaaggccagcttggcagccgcctgctgtatcgcgacagccgcggcgtcgaactgaccccggcgggccagcgcctgctacagcacgcgcggctgatcatgcgccaggtggaatacctgaagagcgagttcaccgagtacggcagcgacgccgccgggcatatccgcatcttcgccaataccaccgcggtcaccgaattccttccggaaatcctcgccggcttcctcgccgctcgtcccggggtcaccgtcgacctgcaggaacgcctcagccgcgacattgtccgcggcgtgctggacggctccaccgacctcggcatcatcgccgggccggtggcggccagtggcctgcaggtcctgcatttcagcaccgaccgcctggtgatggcggtgccccagggccatccgctggccggacaggccagggtacgcctgcgcgacaccctgcagttccagcatatcggcctgcccgagggcaccaccctgcacgccttcctgtacgaacgggtggagcagatgggcgagcagctatcgctgcgcatccaggtctccagcttcgaggcgatctgccggatgatcgagggcggcgtcggcatcggcgtgatcccgcagtccgccgcgcgccgccacagccggacgatgaagctggcgaccatcgaactcgacgagccctgggcgatccgcgagcgcagcctgctggtacgcgacctggaagcactgccgagttgcctgcgggcgttgatcgaggagttgcagagggtgggagacagcctgtagggcggataacgcccctggcgttgtccgcggggctccggagaatcggcggacaaccgccaggcggttatccgccctacgactcccgacaagccggggtgcgatcgtcgcgaagggcgccgcccaccactcccgctcagttcgccaacccaccgctctccgccaggctgtgctcgtccgcggcgagcatcgccggcatgtgctcgcggaggaactcgacccaggtgcggatcttcgcatccaggtactgccgcgaggggtagagggcgtagacgttgagatggaacaggctatagcgcggcaacacccgcaccaggctgccgtccttcaggccgttgaccgccgcgtacaccggcagcgcgccgatacccatgccggagaccaccgcctcggtcatggcgtcggcggtgttgacctggaaatgcgtctggttgatgcaggccagttcctggccgtcgggaccgtcgaacagccagcggtccagcgacatcaccgagttcaccaggcgcaggcaacggtgcgcggacagctccgccggcagcttggggaagccgtgcgcggcaatgtagcccggcgaggcgcagaggatgctgtaggtctggccgatgcacttggagacgaaaccggagtccggcagctcgggggcgatcaccacggaaatgtcgtagccctcgtcgagaatgtcggtgatccggttggccagggtcaggtcgaagccaacctccgggtaggtctcgcaatattgcgagatggccttgatcaggtagtgctggccgatgccggtcatcgcgtggaccttcagcgtgcccgacggccgcgcatgggcgtcgcccgcctcggcctcggcctcctcgatgtaggcgagtatctgctgggcgcgcatcaggtagcgctgcccggcttcggtcagcgcgatgcgccgggtggtgcgatgcagcaggcgggtctgcaggtgggcctccagcttggccaccgcacgggagacataggcggtcgtcaggtccaggcgctgggcggcggcagtgaaactgccggtctccgcgacgctgacgaacgcgcgcatattgaacaggatatccatcacggccctctaggctctgacgcttatggcgcgtctcttttccacgcaacccggaggacaccccaaggcggcgcagattctgtcacgagtcaacccacctattattgccttttgtgacaaaaatttttcacctatccgagctcttatccgcaagcgcgggcgctcctagaattcccagccgtttcggcctcccctcgccgtcgttcaggattcgcagcagtgccccgcgccacccggaaaggtctccccctggttccaccggctcccctcgcgttctttcccagccccgacgaattgcgccgcgccctgctcgaatgggcgcgtagcgacggcgtcgcctgggtcttcgtgttcaaggccctgctcaccgccagcctcgccctgtggctggcctatcgcctggaactgccgcagccgagcacggtgctggtgacggtcttcatcgtcatgcagacgcagagcgggcaggtcctggccaagagcttctaccgcatcgtcggaaccctgatcggcctcagcgtgatggtcactctgatcgccctgttcgcccaggagcgcgtgctgttcctcgcctgcctggcgctctgggtcggcctgtgcaccgccggcgccgcgcgctaccgcgatttccgcggctacgcctgcgtactcgccggctacaccgcgaccatgatcgggattccagccaccgcgcacccggaaggcgccttcatggcggcgctgtggcgggtcctggaaatatccctgggcatcctctgcaccggtaccgtcagcgccatcttcctgccgcagaccagcggcgccgccctgcgcaacacactctacgggcgcttccgcgacttcgccgggttcgccgccgaaggcctgcagggcagcctcgacggcgagcgcttcggcgagctcagcgcgcgcttcgtcgcccagtccgtgggcctggaaaacctgcgcagcgccactactttcgaagatccgcacatgcgcctgcgcagcggccggctgattcgcctgaacaacgaattcatggtcatgaccagtcgcttccacggcctccaccgcctgctcgaacgcctgcgcgggcgcggggcgcagaatgtcctggaggtcctggcgccctgcctggcggagcttgccgggctgctcgcgccgattcgcgaacggacgcccaccgacgccgacgccgcgcgcctggccgaacgcatcgaggcctacaagccggaactgatgcagaacatccgccaggcccgccagcgcctggtggagcagcgccccggcgagaacgacctgctggatttcaacaccgctgccgaactggccttccgtttcaccgacgacctgcacaactacgccctgacccacgcttccctggccgaacaccaccatgcccgcgagcaatggaaggaaagcttcgtcgcccgcgccaacccggtcgccgcgctggtcgccggagcgcgcagcgcgctgatgatcggcctgctcggcacgttctggatccagacctcctggccccacggcggcaccttcgccctcaccgcggtactgatctcggcgctctcctcgacctcgccgaatcccggccggttgtcgctgcaactcaccctcgggaccctcgccggggcctgcaccgggctgttcgtgctgctctacctgctaccccacgtggacggtttcccgatgctgctctgctgcctgctgccggtcttcgcggtcggcgccctgctgctctggcggccgcagtggaacggctacggcgtcggcctactggtgtggttctgcttcgcctcgctgccggccaacatggcgcgctacgacgccctggccttcttcaacgaatacctggcactactcttgtcgatggtcctcgccacggtcgccgccatggtgatcctgccgccgaaccggccgtggatgtggaagcgcctggagcacgacctgcgcgagcgggtggtgttcgccatcagcggcaagagcaagggcctggtctccggtttcgaaagcggcacccgcgacctgctgaaccaggcctacaccttctccgccggccgcccggacgtgcaacgccggttgctgggctggatgttcctggtgctggaggtcggccaggcgatcattgagctgcgcctcgaacagcaacgcctgccccaggagccctgctacgccgaacgcaccgcctggcgccgggcgatccgcctgatgggccgggcgctgatccggctgttcctgcaacccgggccgagcaaccgccagcgcgccctgcacgcggtgaaccaggcgatcatggcggtacgggcggcgccggagccgcgcgcaccgcagttcgatacctcgccgctgcgacgggtgctcagctacctgcacttcattcgcagcgccctgctcgacccgcaatcgcccctgggccaggaaagaaacccgtgagccggtcgcaaagccgcggcgcagaaggccacagggatattgttaccgatccgtacaaggttcttgtcttgactgagtctatatgtcgcagcctatcccaacttacaataaacccaacagccgaagttaactcccgttgaacttcgactccgcaacttgattgcagacttacttacccagccttgtttatcgagttgccccggtgacctgtccgcctgtcttccgacggcagatcgtacccactcagaaactactcaggtaaatagtaatgaaggctttcgccctgatggccctgttcgcctgctcgccgctggtgatggcggctggcgcccaggatcaacctgccagccagcaggaaaacgctgttgaagaatatgcctatggcatgcaactggatgtggctcgcgttatatcttcaaccgacacttccaatgcctgcggcatcgttcccgcacgcatgacctacgaagattcgaacggccagaaacataccgtcgaatatcaggtctggggcaacggctgcactggcggctaaactctgctcgacctccgaaggatcgcgccacgaggggcagctcgcccatccggcgcgatcattgtgtactcggcggcgacaatcccgcccctcggcgaacatcctggccgtcttccccacgcctcatcgtgctgccgccctttcacaagggccgacgcctccaccgtttctttcccagcctgcaacaaaccggcaagcatgccgctcagccctcgccttgccccacgccatgctggcgcagcttgttcgccgccgtggtatgcgaaacgccgaggcgcttgcccaactggcggctgctcggatgttcgcggaacaggcgctccagcaccgccttctcgaagcgcccgacgatggcgtcgaggtctccttccagggaaaaatcccccagcggctgcggcgcgccgtagtccggcaggcggatgtgctcggccttgaccgttcccccttcgcacagcgaaaccgcctggaacagcacgttttccaattgccgcacgttgcccggccagtggtagcgttcgagacgttccagcgcctgcgcggaaagcttcggcaggccgcagccgatctgccggctggcctggtcgaggaaatgctcggcgagcggcgccaggccatccaggcactcgcgcagcggcgggatgtgcagcgagagcacattgagacggtgatagaggtcctggcggaattcgcccttggcgcagagttcggacaggtctacctgggtggcgcagatcacccgcacgtccaggtacacctcctcgtcgctgccgacccggcggaaacagccgtcctgcaggaagcgcaacagcttggcctgcaggcgcgggctcatctcgccgacgccgtcgaggaacagcgtgccgccggcggtaagctccagcaggccgagcttgccctccgggcgggcgccctcgaaggctcccggaccatagccgaacagctcggtctcggccatggattccggcaggccggcgcagttcaacgccatgaacggcgactgcccgcgcgggctggccaggtggcaggcgcgcgccagcagctccttgccggtgccggtctcgccctcgatcagcagcggcgcgtccagcggcgccatgcgccgcgcctcgcggaccaccgcggccattacccgcgaactctggaagatactgtcgaagccacgcagctcctgcttgcgcacatggtagatgcgctcgccgacgcgatccgcgcgatgcagggtcagcaccgctccagccagcgcctcgctctcgtcgtgctcggattgcagcggcgcgatgtcggcgaggaacacgtcgcccttcaccttcacccgcagcccgttgatccgcgccttgttggcgcgcaccagttcgggcaggtcgaggtcctccacatagcgcgacagcggaatccccggcacctcgtcgacgcgcacgccgagcaactgcgcggcggcacggttggcggcgacgatctgcccgcccatgtccaccgagagcaccgggaagtccagggcggcgagcagcgcgttgagttccaggtgccgacgctcgctgggcatcaggccgacgcgcttgacgccgaagacccccggcaccgcctccagcttgggccgcaacgactgcaactggaggttgatcatgttcggacagagcaggtagatggcgttgccctggtcgccgccgacttcgccgcgattgacgttgatgccgtagtcgaccagcaggttgaggatgtcgcggaggatgcctacacggttctggcagtgcactttgatacgcatggcgtggcccggtgttgtcgttctgatgggctcgcggccggttttttaactcccggccggaaatttccgtcaagaatatgtgacagttagactcaccagcaacaatgcctgacccaatgaacaggcgacccaggccaattcgtaaggaaaactttacgaaaacgccgattcctccccgttgcccggtccctatccggggctgcacggaccgtcccgacgcggtatcgataaggcaacgacaacaacaaagaccccgcggccacaagccgctcatggagtccgtatgaaaacgacgcagtacgtggcccgccagcccgacgacaacggtttcatccactatccggaaaccgagcaccaggtctggaataccctgatcacccggcaactgaaggtgatcgaaggccgcgcctgtcaggaatacctcgacggcatcgaacagctcggcctgccccacgaccggatcccccagctcgacgagatcaacagggttctccaggccaccaccggctggcgcgtggcgcgggttccggcgctgattccgttccagaccttcttcgaactgctggccagccagcaattccccgtcgccaccttcatccgcaccccggaagaactggactacctgcaggagccggacatcttccacgagatcttcggccactgcccactgctgaccaacccctggttcgccgagttcacccatacctacggcaagctcggcctcaaggcgagcaaggaggaacgcgtgttcctcgcccgcctgtactggatgaccatcgagttcggcctggtcgagaccgaccagggcaagcgcatctacggcggcggcatcctctcctcgccgaaggagaccgtctacagcctctccgacgagccgctgcaccaggccttcaatccgctggaggcgatgcgcacgccctaccgcatcgacatcctgcaaccgctctatttcgtcctgcccgacctcaagcgcctgttccaactggcccaggaagacatcatggcgctggtccacgaggccatgcgcctgggcctgcacgcgccgctgttcccgcccaagcaggcggcctgacgagaaacgccgccgccgcggctgaccccgcggcggccttgtactatggtggacgggcacggcccgtccgccgctcccacatgcgacaaccaaggactcccaccatgaccgcactcacccaagcccattgcgaagcctgccgcgcagacgccccgcacgtcagcgacgaagaactgcccgtgctgctgcggcagatcccggattggaacatcgaagtccgcgacggcatcatgcaactggagaaggtctacctgttcaagaacttcaagcatgccctggccttcaccaatgccgtcggcgagatatccgaggccgaaggccaccatccgggcctgctgaccgagtggggcaaagtcaccgtgacctggtggagccactcgatcaagggcctgcaccgcaacgacttcatcatggcggcgcgcaccgacgaggtagcgaaaaccgccgaggggcgcaaatgagtcatttcgccaaggtcgcccgcgtaccgggcgacccgatcctgggcctgctcgacgcctaccgcaacgatccgcgcgcggacaagctggacctcggcgtcggtgtctacaaggatgcccagggcctgaccccgatcctgcgctcggtgaaactcgccgagcagcgcctggtcgagcaggaaaccaccaagagctacgtcggcggccacggcgatgcgctgttcgccgcgcgcctggcggaactggcgctcggcgccgcctcgccgctgttgctggagcaacgcgccgacgccacccagacgcccggcggcaccggcgccttgcgcctggccggcgacttcatcgcccattgcctgcctggccgcggcatctggctgagcgacccgacctggccgatccacgagaccctgttcgccgccgccggcctgaaggtttcccactacccctacgtcagcgccgacaaccgcctggatgtcgaggcgatgcttgctggcctggagcgcattccccagggagacgtggtgctgctgcatgcctgctgccacaacccgaccggtttcgacctgagtcacgacgactggcgcagggtgctcgacgtggtgcgccgccgcgagctgctgccgctgatcgacttcgcctaccagggcttcggcgacggtctcgaggaagacgcctgggcggtacgcctgttcgccggcgaactgccggaggtgctggtcaccagttcctgctcgaagaacttcggcctgtaccgcgaccgcgtcggtgcactgatcgtctgcgcgcagaacgccgagaagctcaccgacctgcgtagccaactggccttcctcgcccgaaacctctggtcgaccccgccggcgcatggtgccgaggtggtcgcggcgatcctcggcgacagcgagttgaagggactctggcaggaagaggtcgaaggcatgcgctcgcgcatcgccagcctgcgcatcggcctggtcgaagccctggcgccgcacggcctggccgagcgcttcgcccatgtcggcgcgcaacgcgggatgttttcctataccggactgagcccgcagcaggtcgctcggctgcgcgacgagcacgccgtttacctggtctccagcggccgggccaacgtcgccggtctcgacgcgcgccgcctcgaccgcctggcgcaagccatcgcccaggtctgcgcggactgaaccctcacggttaccctgagccggctgtgatggccggctttttttcgccccagcgaatgccgcgcactcccgccgaggcggcggataaccgcgttgcggttattcgccctaccgcaccacgaccttctgggcgtagggcgaataccgccacaggcgttatccgccgaacctctccgaaccgggccaaccataagtcagcactttcaaagccctacgtgcttttcctacaaaagagcataaaatgctcaattatgggcaccagttcacactgcgccccacggcccccactttctcgtcttagtgagcaacgcacgtgagaaaccgtctcctgtcactggtcaccctgttcctgtccctcagcgttgccaccgcggtatccgcctccccgccgcccaaggccgggctgccgctgcaacaggagctggcgtcgggcagcgcgctggttaccgaccagaacaccggcaaggtgctctactcgcgcaaccccgacctggtggtgccgatcgcctcgatcaccaagctgatgaccgccatggtcgtgctcgactcgaaactgccgctggacgaggtactgccgatcgccatcagcgagaccagcgaaatgcgcggggtgttttcccgggtgcgggtcggtagccagatcagccgccgggacatgctcctgctcgccctgatgtcctcggagaaccgcgccgccgccagcctcgcgcagaactatccgggcggcaagaacgccttcgtcaaggcgatgaacgccaaggcccacgccctcggaatgaagaacacccgctacgtcgagccgaccgggctgtcgctgcacaacgtctccaccgctcgcgacctcacccgcctgctggtggccagccggcaatacccgctgctcagccagtggagcaccactccggagaagaccgtggccttccgccaccccaactacaccctgggcttccgcaacaccaatcacctgatcaacaacaagacctggaacatccagttgaccaagaccggcttcaccaacgaagcaggtcactgcctggtgatgcgcaccacgatcaaccgcaatccggtcaacctggtggtgctggacgccttcggcaagtacacccacttcgccgacgccacgcgcctgcgacgctggctggaaaccggccaggtcactgcgatcccggccgcggccaaggcctatcgcctgcaacgcgaccgcgagcgcggcctcggccagccggtggcccaggccgtacgctgatccgtcgcgaagaccggccggctcagaaattcaccttgccgcgcccggccttcaccgcgccgcgcttggccttgccgtccagccggcgcttctgcgagccgcgcgtaggcttggtcgggcgccgcgccttctgcaccttggccacgctgcggatcaactccgccaggcgctccagggcatcctcgcggttctgctcctgggtccggtactgctgggccttaatcaccaccacgccgtcgccgctgatgcgctggtcgttcagtgccagcagacgctccttgtagaacggcggcaacgacgaggcctggatgtcgaagcgcaggtgcaccgcgctggagaccttgttgacgttctgcccgccggcgccctgggcgcgaatggcattcagctcgatctcatggtcgggcaggtggacggcattggagatgatcagcatggggcggcacggtggaccaacgggctgccagcataccccctttgccgagcggaaaagcaggccaaaagaaacccggccgcggccgggttccttcatttcggctaaggcgccaggtcgaactcaacgctccttgcaggcgaccccgtcggtgggctcgccgcccttccagtcgccgtagagggtggcttcctcgcccttggtccaccagatgtactggccggcggcgtacttggcgccggaggcggaaatcacattgctgaagaccagcgtcgagttgtcgctgaccggcaccacggcgatgctgttgtcgcccttgttcaggtactgcacggtgaacttgcgaccgttctcgcacttgtagtcgacgctgcgggtatccagcttggcatcccccggcagggccaggtaatcgacctgggcggtctgcttgtcgtcgtcgctgccgccgcaggcgaccaggaccacgggaacggcagccagaagcagccagagcgcttttttcatggaaatccctctaacgagaaaaaatggcgctgccactgtaggaattcggcacctgccgcgtcaacgacaggcgcccctagaaaaagtcttgtgggccgccgggacgcgcaaaggagcgctcccctctcctctgcgcgccggcgccccatcgatcactcggtgaccggcttcacccgcaggcccggcatcggccgcggggctcccttgagtcggtagcaggcccacatcaccagcagccagaccgggatggcatagaccgagacctggatgccggggatcagcaacatgacgccgaggatgaacaccacgaaggccatgcacaggtagttgccgtacggataccagaacgcgcggaagtgcgtgcgggtgccctggcggtccatctgcgcgcggaacttcaggtgcgccatgctgatcatcgcccagttgatcaccagcgccgccaccaccagcgacatcagcagctccagcgcctggtgcgggatcacatagttcaccaccaccgcgaggaaggtcaccagcgccgataccaccagggcgcgtaccggtacgccgcgcttgtcgaccctggccagcgcgcgcggggcatcgccctgctcggccaggccgagaagcatgcggccgttgcaataggtgccgctgttgtacaccgacagtgcggcggtgagcaccacgaagttcagcaggtgcgcggcagtgccgctgccgatcatcgagaagatctgcacgaacgggctgccgctgtaggcatcgccggaagcgttgagggtctgcagcaggctgtcccagggcgtcagcgagagcagcacgaccagggcgccgatgtagaagatcaggatgcgatagatcacctggttgatcgccttcgggatcaccgtcctcggcttgtccgcctcggccgcggtgaagccgagcatttccaggccaccgaaggagaacatgatgatcgccatggccatcaccaggccgctcactccgttggggaagaaaccgccgtgtgcccagaggttgctcaccgaagcctgcggaccgccgctgccgctgaacagcaggtagcagccgagcaggatcatgccgatgatcgccaccaccttgatgatcgcgaaccagaactcggcttcgccgaaggccttgacgttggccaggttgatcgcgttgacgacgacgaagaacaacgccgccgtggcccaggtcggcacctccggccaccagtagtggatgtacttgccgaccgcggtcagttccgacatcccgaccaggatatacagcacccagcagttccagccggagaggaagccggcgaagccgccccagtacttgtgcgcgaagtggctgaaggagccggcgaccggctcctcgacgatcatctcgccgagctggcgcatgatcatgaaagcgatgaagccggcgatggcgtagccgaggatcatcgacgggcctgccgacttgagcaccccggccgagccgaggaacaggccggtgccgatggcgccgccgagggcgatcaactggatgtgacgattcttcaggccgcgcttgagctcgcccgaatgcggatgttggccgtccattgagttatctcacgcaagtggaaatttattgttgtcggaggcgaaacggggccgtgcggctcaggcggcaggcgcacggcgggcgccatgcggggcgcgtggcggcgggcggtcggctgggcgaaggaaggactcacggatcatgcgtcacctgtttgttgttgtacgtgacgtgaatgggccgccaggctcgtggctcggcggtgcgggcaaggctggcgcgatcggcgccgctggaacggaaacgcggagcgcaaggaaaaccgccagccccggaacaggctggcggcagcgggatcagatcacgccgcggcgaatctgatcttcctcgatggactcgaacagggccttgaaattgccctcgccgaagccctggttgcccttgcgctggatgatctcgaagaagattgggccgatcaccgtgtcggtgaagatctgcagcaggatgccgtcgtcgcccggggcgccgtcgatcagcaggttcagttcgcgcagttgctcgagcggctcgccatgcccggcgacgcgggtgtcgaccttctcgtagtaggtgtccggggtcgacatgaacttcacgccgttggcgcgcagcttgcgcaccgtggcatagatgtcgtcggtggtcagggcgatgtgctggatgccttcgccatggtattcgcggatgaattcctcgatctgcgaggtatcgtcggccgactcgttgatcgggatgcggatcttcccgcaaggcgcggtcatggcgcgggagaacaggccggtgagcttgccttcgatgtcgaagtagcgaatctcgcggaagttggcgatgcgctcgtagaagccggaccagacgtccatctggccgcgcttgacgttgtgggtcaggtggtcgatgtaggtcaggccgaccgagttgtcgttggcgctgcggccttcgatgaactcgaagtcgacgtcatagatgctgcggtcgccgtagcggtcgacaagatacagcagcgaaccgccgatgccttccagggaagggatgttcagctcgccgaagttggcgtggctgcccaccagcttggcgccctgggattcggcgtaggcggcggcctgggaagcgttcttcacccggaaggccatggcgcaggcgctcgggccgtgcttgagggcgaattcatggacatgcccggtcgggctgccgttgagcacgatgttgatatcgttctgctggaacaggaagacttccttggaacgatgcttggcggtttcggtgaagcccatcatgttgaacagctggcgcagctgctcgatgcccttggcgtcgggggcggtgaactcgacgaattcgaatccgtcggtaccgatgggattgtgctgttcgatcttggccacggcgttcatccggcctcctcgttgttcttgttgaatggaccgccgccggtccaggcggccggcgacatgggagatgccttcatctcaccccgtggcggcgcggcggacaagccgtcggcagggcccggcgcagggcctggcgcagggtttctggcaactattccttacgcgccggcggcatgcatggcgaacgcccggtcttcgtaaaattatctttacagtgcggtgcgaaaagctgccagcagcgctgtcacggctgcgctgaaagccggcgctgcatgatcggcgtcaagcggttaacctgcgtctttcctccgcgacggcattcccatggcacgacccgccccacccgacctgagcgacagtcgccggcccctgcgcggcgtcgcccgcagctatcctgccgggcaccgcgtcgatgcccacgagcacgcctggggccaggtgctctatgcggtgtccgggatgatgtggctggagacgcccgacgaggccctgccggtcccgccgcaacgggcggtctggttgcctccgggcctgcgccatgcggtgcgggtcgcctccgagttgcagatgcgcaacatctacctgagcccggaactctcccgcggcctggaggaccgcaccctggtgctggtggtcggcccgctgctgcgcgagctgatcgtcagcctggtggagcaggaacgacagagcgacccccactactatcgggcgctggccgatctcgccgtcctcgaactcggccgcgcgcgccgttccagcctccgcgtaccgctgccggacgcctccgacaggcgcctgctcgcgctgtgccaggcggtgatggccaatccctccctggacatcggcctggagcgcctggccgaagacgccggggccagcgtgcggaccctctcgcgcctgttccagcgcagcctgggcatgggcttcgccgactggcggcggcaggtgcagctggcgaccgcctccgccgcgctcatcgatggccgtccggtggcaggcatcgcccatgccctgggatatacgccgagcgccttcagcgacatgttccgccgcgagctgggcgtctctcccaccgagtacagggccgagcatcaccagccgttccagccttgaccggtattcgatagcgattggccgatagatgttttttcggccaactagactggcaccatcgttcaccgtccctgtcagccgccatgaactacctgatctccctcggcatcggcctgctggtcggcctgctctacgccgtactcgacttccgctcgccggcgccacccgccatcgccctggtcggcctgcttggcatgcagctcggcgaacagcttttcccccttggccgcgacctgctgcagcagtggctgcactgatcgccgcgacgacacggagcccccgatgaaagcactgcaattcgaccgtaccggcgacctcgccgccctcgagctggtggacatgcccgacccgcttcccgccgccgatgaggtgcgggtggaaatccgcgccgccgggctgaatccgagcgacgtgaagaacgtcctcggccgcttcccctataccaccctgccccgggtaccgggccgcgacttcgccggggtggtggtggagggaccgaaggctctgctcggccaggcggtctggggcaccgggcgggagccgggattcttccgcgacggtagccacgcgcagttcctgaccctgccggccgccggcgtcgcgctcaagccggaaagcctgagcttcgcccaggccgccagttgcggggtgccctacagcaccgcctgggacgccctgcaacgcagccaggtcaaggccggcacccggctcctggtaatcggcgccaacggcgcggtcggcaaggccgcgctggcgctggccaaggccctgggggccgaagcgatcggcgcggtgcggcgcgaggagcaacgccaggcgctggaaacgcagggcatcgccgcgctgctgctgggcgagccggccgaactggcggcacaggtggaagggatcttccccggcggggccgaggtgatcttcgatacgaccggtttctggctcgaggcggcggtcccggcgctggccgccttcggtcgcctggcgatcatcgccgcaccggccgacggccatgtgcgcctgccggcgttgaacctgtaccgtcgcggtggctcggtggtggggatcaactcgctgctctatggcgtggaagcctgcgcaggcttcctcgacgccttcggcaagctgttcgaccaaggccgcctgccgctgccggacgggctgcgggaagtcccgctggagcagggcgttgagcagtaccgggcagtgaacgaaggcacctgcgagaagatcatcctggtgccttgaggaccagcggaatcccggcggaacacgccgggattccgctgcgcgcaagactactccgcgccgaccgcgagcttgcgggcgctgcgcgcctcctccagctgcatgcagcgctcgaggaacaggtacatgtagtcgtagctcttgcagatcgcgtcgcgcagttgccggcgcagctcggcgctgggattggtgccggccagggtgcagatgatctccagcgcctcccaggggtgggcatcgtcgtactgggcgtggagcttgagccacttcatggcgcgcttgcggccttccttggggaaggcgttttcgtagacgccgttcgaacagaccagcgccgaccactcgccggtgacgccttcgatggcgtagttggtggcggccatggccaccggcagtgagtcgctggcgcaggtgtgccagcaccagtggctgagcgcgtgcagttcggccggcacgtcttgcgcctggatctcggccaggctcacgccgtgggcctcggcccagtgcagccagtagtcggcgtggttgagttcgacccgaatattgcgcatcagccagcggcgcgccatgtcttcgccgggatggcgggcgaaacgggtcttcagcaggttctgcgacatgtacaaggggaactgctcgaccaccggccagccgccgatcaggtacaggcgcatcagcgccgggctcagctcggcgtcgcgcatgcgccggtacagctcgtggccggaaacccggtccttgctcgcctggcagtcgacgatcagttgctgcgcccactgcggatagcttcccgcctcctgcaaggggcccgtacggtcaaagaactcgctcacacccgtctcccttctcttcttctcggcaacggcctcatagcagcgaaactactctttcttcgctccgcggtcacctaccggaggttctgtccgaggctcggccacaggccctgggcatccagccctgcgcccggaggctggcgactgaacggcaggggcgcgccgatggccaggccctgggcatagtcgatgccgatctcgcgcagcgcttccatgacttcgacggtctcgacgaactcggcgatggtacgtttgcccatcacgtggccgatatggttgatcacctggaccatggcgcgatcgatgggatcctcgagcatgtccttgacgaagctgccatcgatcttcaggtaatccaccggcaggtgcttgaggtagatgaaggacgacatgccagcgcagaaatcgtccagggagaaacgacaaccggtgtccttgagctcgttgatgaagcggatggcgctggccaggttggcaaccgccacggtttcggtgacctcgaagcagatcgtctgcggcggaatgcggtaacgggcgaacagctcggtgaggaactgcaggaacgactcgtcgccgatggtcgcgccggagaggttgatggcgcaggtgccgatcggctcggcgcgagggtcctgggcgcgctcgacaagggtgcggaaggcattctccaccacccagcgatcgatcagcgtcatcaggccgtagcgctcggcggcgggtatgaagctcagcggcggcaccaggcgcccgccctcgtcgcgcaggcgcagcagcagttcgacgtgcaagccctcctccgcaccttcgcccagcggcacgatgggctgggcatagagactgaagcggtcttcctccagcgccaggtggatgcgctggacccaggtcatctcgccgaagcgcatcgatagttcgacgtcgtcctgatggaacacctggacccggttgcggcccttttccttggccatgtagcaggccatatcggcggagcgcagcgcctcctcgagggtcgagatacccggcagcaggtgcaccaggccaacgctgacggtgcagttgaacggctgcccgctccaggtgaagtgcaggtcctggatggtcttgcgcagatggtcggcgatctccacggctttttccgccggacagttctccagcaggatgccgaactcgtcgccgcccagccgcgccagcgtgtcgccctcgcgcaagccttgttgcagcagggtacagacctggcgcagcagttcgtcgccggcggcgtggccgcaggtgtcgttgaccagcttgaactggtccaggtcgaggaacatcagggcgtgccgcccgctgttgcgctccaggcgttccagcgctatctgcaggcgatactcgaactcgcggcggttggtcagcccggtcaacgcatcgtgggtcgcctgccaggacaggcgcgccatgtactggcgctcgcgggtcatgtcgtgaagcaccaggaccaccccggtgatctcggcgccacggtggatcggcgcgcccaccagggtcaccggcacgctgctgccgtcgtgacgcagaaccagcttggaatgctcgcgaccgccgtcgatctcgccgctgaggatctgctctatcagcagcatgccctcctcccgcgagctttcgtcgacgatccggaacagcgacgccaggggcaggccgcgggccttgtccagcgtccagttggtcatctgctcggcggccgggttgaggtaggaaatgcccccctgggtgtcggcggtgatcactccgtcgccgatcgaggccagggtgatctgggcccgttcgcgctcggcatcgagggcgttctccacttcctggcgctgcatcagttgctgccgggtccgcaggaacgccaggaggatgagcacgctggcggtggtcaggttggccaccagcagcagcctgagcaaggcccgcgagccctcgccgagggcgtcgctgaaggccttggccgccggcgtgaccttctcgttgatcgcgtggatctcggtcttccactgttgcacctgctcggcgctggcctgcccggcgccgatgcccgcgcgcatcttgccggcgacgtcgatcagttccatgacgtacttgtcgcccaccagccacagctcgatggcgcgctcgaagtaactgaagtcgtggaagttgcggtacagccagatgatcgcggtaacgtcgtcggcatggttgccgcccttgaggatgccctggcgggccgcctcgatgtccgggtcgggctggtccagggcaaggcgcatctcgcggtcgccgagggggatcgcgatggcctcctcgtagcggcggaagtcttcgtcggcgcgtgagtcggcatagagggtgaggtagtagatggcatccttctggcccttcgaccagaggctttcgccgccgacatagctgcgcaccgcggagaggacgtagagactgccgcccgccagcatggcctgcagcagcaccacgacgatgaagggccataccaggccgagcaggcggggcttgtcgagagtccggttctgcctcattccatctaccattcaaactggcgctaagcgatcgggcgccgtctccgtcgcccctgactgcatcacctgtcggccgctcaagatcccgtcgcagaactcccgaggccttgcctgccggcagccacgacgctggaggaggcggacacctggcaaacagtaggagtctagtggctgtttgccgaacctgccctgcacctggcggaacagacagcgttttttattgccgcagccaataaaaaccggatgtcttatatggaatatacgagaaaaaccgccaggcgacagcctggcgcctcacatctgttgcagatgtccgtagagccgggcgtagaggccgccttcggcgatcagttgctggtggtcgccgtcttcggcgatatgcccgccatcgaagaccaggacccggtcggcctgcttcaccgccgacagccgatgagccacgatcaatgtggtgcggccttcgaggaagtcgccgagcgcctggtgcagggcgtactcggtagcggcgtcgagggccgaggtggcctcgtcgaggatcaccaccctgggctcggcgaggatcatccgggcgatcgccaggcgctgccgctgaccgcccgacaggcgcaccccggaacgcccgaccacggtgtccagcccctgcggcaggcgccgcacgccgtcggccaactgggcgatctccaaagcccgccagcaggcctggtcgctgcgttcgcggcccatggtcaggttggcccgcacgctgtcgttgaacagcgccggatgctggagaaccaccgcgacatgttcgcgcacgcagtccaggccgatttcctccaggggcaccccgccgtagcggatgctgccgcgctgcgcactgtagaggccgagtagcagttgcaccagcgtgctcttgccgccgccgctggcgccgaccagggcaaccttctcgccggcgccgatgttcaggtccaactgctccaggaccttgtcctcgccgtaggcgaaatccagcccgcgcacctcgatgccaacggtcgtgcggccggcgaacggatcgcgcagcggcgggtagcgcggctcgtcggcccgcgccagcaactcgttgatccgctgcaacgcgccgccagcggcgtagtaggcgtattgcaggccgagcagctgttcgaccggaccgatcatgaaccagaggtagctgaacaccgcgagcatctggccgatcgacaggtccgagagcagcacggtaagcatcgccgcggcgcggaacacatcgatgccgaactggaacagcaggccgctggcgcgcccggcggcgtcgcttttccattgcgaggccacggcgtagtcgcggacttcctgggcgcggtggccgaggcggccgaggaaatagccctggcgattgccggcgcggacttcctggatcgcctcgagggtctcggtgagcgcctgggtgaagcgcgcggtgctgtcgttctcgagcttcttgaggtgcttgacgcgcttgcccagttgtaccgtggaccagatcaccagcgggttgaacagcaggatcagcaaggccagctgccagtgcatccagaccaggatcgcggcggtgccgagcagcgtcagcaaggcgaccaggaagcggctgagggtttccccgacgaacttgtccagggtgtccaggtcggtcaccaggtgggcgctgatcgaaccgccgccgagggtttcgtattcgcccagggcgatatgccggaggcgctcgatcagacgcaggcggatgcggtagacgatgtccttggacagccgcgcgaacagcttcgcctggagcacgttgaacaccagcgccgccccccgcaacaggagggtcgccgccagcatcaggccgatgtagccgaacgccacctgccagtcggcgggcaacaggcggtccatgaaacgcagcgcgccgtcgcccttgccgagcagcacttcgtccaccagcaacggcagcagcaaggggatcggcacggtgcagagggtggccagcaccgccaccaggttggcgagcaacagggctttcttgtggcgcagtgcgagtcgacgaatctccgcccagctcaggcggtctccgcgctcactcatgccggccccgttccagccagcggccgagcaaaggtgaaagttcggcaagcggctggtagccgttggtgagcaacgccagttggccgttgcgttcggccagcagggtcgggaacccggcgatgccgaggtcctggacccaggcgaaatcggcggcggtggcgtcacgcgcctcgccgctgtcgaaggccgcggcgaactcgatgcgcggaagccccaccgcttccgccaggccggcgagcaccgccgcctgggtgacatcgcgaccctcggcgtagaacgcccgctggatcgcccttaccagcggccaggcgctttcctcgtcgaggctgcgcgccgccaccagggcccggcaggccggctcggtgtcatagacgaagccttcgggcaacgcgtcgtcgaagcggaacggctggccggtggtctgctgcacggtctgccagtggccgaggatgtagccgcgggtattcgggtcgagcgccgcgccgtggccggcgcgcaggccaccggctaccaggtggaaagcgacgccgtcggcggccgcctgccgggacagcgcctcggcgaccggggcgaagccccagcaccaggagcacatggggtccatcacgtacagcaggcgggccttggccaaggttcagttctccagcgtggactggcgcggatcgcgaccgagcgggtgcggctggttgcgctgccgcgccagttcgatctgtttctgccgctcgcgggcgccggcgcgggtcttctcgctcagcgagtcccagcagtgcggacagctgatgccgggcacgtagtgctcggactggcggtcctccagcgaaaccgggttgcggcaggcgtggcactgatcgtactcgccctcgctaagatcgtggcgcacggtcacgcggttgtcgaatacgaagcagtcgccgcgccacaggctctgttcctgcggcacctcttcgaggtacttgaggatgccgcccttgaggtggaagacctcctcgaaaccggcgccgagcatgtagctggaagccttctcgcagcggatgccgccggtgcagaacatcgccaccttcttgtgccgcgccgggtcgtagtgggccttgatgtactcggggaactcgcggaacgacctggtcttcggatcgaccgcgccctcgaaggtgccgatcgccacctcgtagtcgttgcgggtatcgatcagcaggacttccggatcgctgatcagggcattccagtccttcgcctcgacatactggccgacctgcttgttcggatcgacgccaggcacgccgagggtgacgatttccttcttcagcttgaccttggtgcggtagaacggctgttcgtcgcagtaggattccttgtgctcgatatcggccagccggggatcgctgcgcagccaggcgaacagcgcatcgatgccttcgcggctaccggagacggtgccgttgatgccttcctcggccagcagcaaggtgcctttcacaccgttgtcgagcagggtttgcagcaggggttcacgcagcgccacgtaatcgtcgagagtcacgaacttgtacagcgccgccacgacgatggatgtcatggggatatagcctccaggtggtcgcccgcgtaaagggcggaccggaacgaaaagcgccagccgctggcgccatggaaacgacaacgccggcggaaggccggcgctgggtgcgtagtctagcgcagcaggggcaggctctgcaccccgccgcgacggacgccgtctcagggtatgtcgtgcttgctcccgccgcggcaggtcggcgaggccggcaccgcagcctggctccactcctcaggggtgaaggtatgcagcgccagggcgtggaactcgcccatcaacccaccgagggtggcatataccttctggtgccgcttcaccgcgttcaatccggcgaactgcgggctgaccagcaccaccttgaagtgggtctccagcccgcggctgtgcatgtggctctcgtcgagcacctcgacgtgttgcggatcgaggggctgcagggcggtctggatacggtcacgcatgctcatcgcgaatcacgactcactttttcttctgggccggcgcggcgacgccgagttccttgtccatgtcggccatcagcttgttcaccggctcgacggcgccttgcagcttggcctgggtcagttgggcggattcggcggtcaggcgcggcatcttctccagcaccttcttgcccagcggcgactggtagaaggcattcaggtccttcagctcggactcggtgaagttggtagtgtaaagcttgatcagctcgggcttgatcttgtcccagccgatggcgcggtccagctcggcattggccttggcctggtaacgctcgagaaccgccttcttgctctccggcgccttggcctgggcgaagcgctgggccagcatctgctgcacctgggcatagaccgggaccgtcagcttgtcggcatggaccagcttgaggaattgctcggcctggctggcggaatcggccatggccatggagctgaggctgagcagcacggcgctgccgatgaggcgaagacgggtcatggaaaatccttgaggttgggtagatgtgtccgtgggacccgacattctgcgcctaagttcgaaatccgctcaagcgcggcgccgaatatcgggagaatcctatccggcgcccgcccgctccatgccgtctactatcagttctgtagtgggtacttgccgccttccttccgcagccggcatgcttgcgtcagcctgtcacatggatgtgttagatgaacggaaccgccgccgataccctcgccgtatcgcccccgcccctgcgcaacctctgcgacggccacggccggctcgatccccgggcggtcggctggtccgcccggccgcgggtgctctgccacatccccggccacttcggccggcgcaagcgctggaaccactggtgcatcgtcagccccggctggatgctctcgctgaccatcgccgacctcgactacctgacctacggcgccgcctatttcctcgacctggacagcggccaggcggtagcgcacacgcagatccgcttcttcggcctcggctgccagttgcccgacgagccgcaggccagccatgccttcgagcatccccgcctgcaattgcgcttcgacgaacagcccgggcgcctgcgcgtcaccggccaggccccggacctcggtggcctgccgctggagctggcgctggaagtgcgacgaccgtcgcacctggagtcggtgaacctggtggtgccgatgggcgaacacaccttccatgcctgcagccgccagctcggcctgccgatcagcggctgcctgcagctcggccgccgacgctacgactgccaggcgggccagagcttcgccgcgctggacttcggccgcggtgtctggccgctgcatacctactggacccgcgccgccttcgccgcccccggcggcatcgccggcaacttcggcaccggctggaccgaagccagcgacctgcgcgagaacgccctgtggttcggcggcaagctcagccgcgtgctcgacgacgtgcacatccgcgagcctcgcgacccgctggccgaatggcgcctggacagcgcctgcggtcgcgtcgagctgctcttccgtcccgaacagctgcaccaggcgcggcccagcgtcggcctgttctatgccaatacccgccagtggttcggccgtttcaacggcaccctgcgccacgacgacggcgactgcgtgccggtggacggcgccctcggctggatcggttcgacccgcgcgcgctggtgaggccggcggcgggcaatctatttccgacccgcagcgcggcgaaaaatgcccacgaggaagcgacggcagcggaacccaaggcgggagcgaaggcctaaactgccggatacgcactctggagaacactcatgagccggaccgaaaccgatagcctgggcaccatcgaggtgcccgacgacgcctactggggcgcccagacccagcgttcgctggagaacttcgccatcggcggccagcgcatgccgctcgccgtgatccacgccctggcgctgatcaagaaagccgccgcgcgggtcaacgaccacctcggcgaactgccgccggaagtcgcccggctgatcgaacaggccgccgacgaggtcctcgcaggccgccacgacgaacacttcccgctggtggtctggcagaccggcagcggcacccagaccaacatgaacgtcaacgaggtgatcgctggccgcgccaacgaactggccggcaatccgcgtggcggcaagtcgccggtgcatcccaacgaccacgtcaaccgcgcgcagagttccaacgacagcttccccaccgccatgcacatcgccgccgccaaggccgtgcacgaacaattgctgccggccatcgccgagctttccggcggtctcgccgaacagtcggcgcggcacgccagcctggtcaagaccgggcgcacccacctgatggacgccacgccgatcaccttcggccaggaactctcggccttcgtcgcccagctcgactacgccgagcgcgccatccgcgcggcgctgccggcggtctaccagttggcccagggcggcaccgcggtgggcaccgggctcaacgcgccgaagggcttcgccgacgccatcgccgcggaaatcgccgccgaatcgggcctgcccttcgtcgccgcgccgaacaagttcgccgccctggccggccacgagccgctggtcatcctctccggcgccctgaagagcctggcggtggccctgatgaagatcgccaacgacctgcgcctgctcggttccggcccacgcgccggcttcgccgaggtgaagctgccggccaacgagccgggcagctcgatcatgcccggcaaggtcaacccgacccagtgcgaggcgctgtcgatgctggcctgccaggtcatgggcaacgacagcacgatttccttcgccgccagccagggccatctgcaactcaacgtgttcaagccggtgatcgtctacaacctgctggagtccatccgcctgctcgccgacggctgccgcaacttcaacaagcattgcgtcgccggcctggagccggacgcccagcgcatggccgacctgctggagcgcggcctgatgctggtcaccgcgctgaacccgcacatcggctacgacaaggccgccgaaatcgccaagaaggcctacgccgaaggcaccaccctgcgcgccgcggcgctgcagctgggctacctggacgaagcgcagttcgacgaatgggtacggccggagcagatgctggaggccggccaccatggttgaaaccgccaagaccggcgccaccccgctggaaggcgacggcaagcgcatcctgctgatcgtcggctcgcccaagcgcaagagcttctgccacctgctcgccgaatgctacgcccagggcgcgcgcagcaaggatcacgtggtgcgcgaactgaagctgggcgagctggccttcgacccgatcctccacgaaggctacgaacagagccaggtgctcgaacccgacctgctggaagcgcagcggcagatccactgggccgagcacctggtgttcgtctacccggtctggtggggcggcctgccggcgttgctgcagggcttcttcgaccgcgtcctgcagccgggcttcgccttccgctaccgcggcacccaggacaaggactgggagcaactgctgggcgggcgcagcgccgacctgctggtctgccacgaccagccgctgtcgcggctgcgcttcctcaagggcccgccggcgcaccggcagatggtgcgcagcgtgctcggcgcctgtggcatcgccacccgccgcctggaagagttcgcgccgatgcgcagttccagcgaggaacagcgccagggctggctgcgtcgcgccgaacagctcggcagccaggtctagttcccttcccgcccggctgcggccgggcgcggacactgatcgttctgacaggtccgccaccttcccgccggcttcccttccccgcccccatggcggccctttgcctgcctctaccggctcacagtgcgggtgccgaccgctttgcattccgcgacatccatcaggaatgggtagcgaatctgaccggcccgtcacatttggtagggacctcaaaccggcaccgagggctaggatcagcccgcttcgaaatgaatccggttctggaaaaaaggacttgtcatgaaacactactcagccaccctggcactcctgccactcaccctcgccctgttcctgccccaggcagcccatgcccacggctcgatggaaacgccgcccagtcgggtctacggctgcttcctcgaaggtccggagaatcccaagtcggccgcctgcaaggccgccgtcgccgccggcggcacccaggcgctgtacgactggaatggcgtcaaccagggcaacgccaacggcaaccaccaggcggtggtccccgacggccagctctgcggcgccggcaaggcactgttcaagggcctgaacctggctcgcagcgactggcccagcactgccatcgcgccggacgccagcggcaacttccagttcgtctacaaggccagcgcgccgcacgcgacccgctacttcgacttctacatcaccaaggacggctacaaccccgagaagccgctggcctggagcgacctggaacccgcgccgttctgctcgatcaccagcgtcaagctggagaacggcacctaccggatgaactgcccgctgccccagggcaagaccggcaagcatgtgatctataacgtctggcagcgctcggacagcccggaagccttctacgcctgcatcgacgtgagcttcagcggcgccgtcgccaacccctggcaagcgctgggcaacctgcgcgcgcagcaggacctgccagccggtgctaccgtcaccctgcgtctgttcgatgcccagggccgcgacgcccagcgtcacagcctgaccctggcccagggcgccaacggtgccaagcaatggccgctggcgctggcgcagaaggtcaaccaggactccaccctggtcaacatcggcgtgctggatgcctacggggcggtcagcccggtggccagctcgcaggacaaccaggtctacgtgcgccaggccggctaccgcttccaggtcgacatcgaactgccggtcgagggcggcggcgagcaaccgggcggcgacggcaaggtcgacttcgactatccgcaaggcctgcagcaatacgacgccgggaccgtagtgcgcggtgccgatggcaagcgctaccagtgcaagccctacccgaactccggctggtgcaagggctgggacctctactacgccccgggcaagggcatggcctggcaggacgcctggaccctgctgtaacgccctcgactgccgcccgctccgggcggcagtcgttttcgccgccaggcacccgccgcgagacggcgaatccgcgcaacggtacagtcccccggcgaaaccctggctacgtgtgcctgttcaatctgccgtgcgctccctaggctggtccgaccaccagcacggggaaaccacgcatgcctttttctctcgccgccctccaacaggccgccgccatcgtccaccagagcctgccgccgacgccgcagatacgctggccgctgctatgcgaggcactgggttgcgaagtgtggatgaagcacgagaaccacctgccggtgggggccttcaaactgcgcggcggcctggtgtatttccaccacctggcgcaccagggcgagcggccggccgccgtgatcagcgcgacccgcggcaaccacggccagtcggtggccttctcggcgagccgctacggcatccagccgatcatcgtcgtgccgcacggcaacagccgcgagaagaacgcggcgatgcgcagccttggcgcggagctgatcgagcacggcgaggacttccaagcctcccgcgaatacgccgccgagcgcgcccggcgcgaaggcctgcacctgattccggcgttccatccctggcaggtggccggggtcgccagctacagcctggagttgttcgccgcgctggccgaccttgacgaagtctacgtgccgatcggtatgggttcgggcatctgcggcctgatcgccgcgcgcgacgcgctgggcctgaagacccgcatcgtcggcgtggtgtccgcccatgcgccggcctacgccctgtcgttcgaggccggcacggcgatcagccacccggtcgacacccgcctggccgacggcatggcgtgcagtacgccggacccgagcgcgctggaaatgatcctggccggcgccgatcgtctggtgcgggtcagcgacagggagatcggcgcggccatgcgcctgtgcttcaccagcacccacaacgtcgccgagggcgccggggtggcggcgctggccgccgcctggcaggagcgcgagcgcctgaaggggctgaaggtaggcctgatcctcagcggagcgaacgtcgaccgcgaggtattcgccgagcaactggccgccggcgactgagccggcgccgctaggccagccccgcgaggagcagcagccaccaggcgagcaccagcaactgcacgaagaagccggcaaaacgcagccagacgaacagcgcggaggtgctgaccaggtgcatcagcgactggaacagccgtgcgccgagcaccagtggcgccaacgggtcggtcaggctgctctgcccgctggcgatcgcgtagagcagcgcgccggccagcagcggcaggttctccacgcagttggcatggactcgcaccagccgctggccgaaaccgccaggcgtgttgctgccatcggcggcgaaggcgttcaccgccatccgcccgccgagtaccagcaggccgcgctggctgaccagcaggaagaccagcaacagggtccaggcgatcaggccgagcaggcagatcgcgctagggctgagaaacatggatgacgctccttctattgtgttgtcgtgggaaggatgaagcgtctggattctaggccggctagagcaattgctctattcgcagtccgccgtccttaagtcgtgttctgccggcacgccgctcggccccgatgtacgccgtcggcggatgcgtaaccggacgacccactgcccgcggccttccgaacggacaaagaaaagccccgccgaagcggggccttccttgcacgcagcactcagggctgtcttctcatcagagcgaatcgagatagcgctccacatccagcgcggccatgcagccggcgccggccgaggtgatcgcctggcggtagacgtggtcggccacgtcgccggcggcgaacacacccggtacgttggtcgcggtggcgttgccttcgcgcccgccgttgaccaccaggtagccgtccttcagggccagttgcccttcgaacagcgaggtattgggagtatggccgatggcgacgaacatgccatccacggcgatctcctcgctgccaccatcgcgggtcttcaggcgcacgccggtgacgcccatcgtgtcgccaagcacctcatcgacctcggcgttgagcttgagcactatcttgccttcggctacccgcgcctgcagcttgtcctggagaatcttctcggcgcggaaggtttcgcgacgatgcaccagggtcacccggctggcgatgttggccaggtacagggcctcttcgacagcggtattgccgccgccgatcaccgccacttcgcggttgcggtagaagaaaccgtcgcaggtggcgcaggccgacacgcccttgcccatgaacgcctgctccgacggcaaccccaggtagcgcgcgctggcaccggtggcgacgatcagtgcgtcgcaggtgtaggtgccattgtcgccgcgcagggtgaacggcttgccggccaggtccacggcatgaatgtggtcgaagacgatctcggtctcgaagcgctcggcgtgctcctgcatccgctgcatcagtgccgggccggtcaggccgtggggatcgcccggccagttgtcgacctcggtggtggtggtcaactggccgccggcctgcatgccggtgatcagcagcggcttgaggttggcgcgcgcggcgtagacagccgcgctgtaaccggcgggaccggaaccgaggatgatcactcgggcgtggcggagggtatcgggcatctcgtcggactcctgccgacatcagcgtcggcgcgaataaaaacggggccaccaaagcacatggggaaggcttggaaggagcggtcgccccgggaaaaggtcggccgggcacacttcgcgcccggcatcgggatcacagtgcctcggcgttctcggccaggtacgaggccacgccctcggcgctcgccttcatgcctttctggcccttgcgccagccggccgggcagacctcgccgtgttcctcggtgaactgcagggcctcgaccaggcgcaccatctcgtccacctcgcgccccagcggcaggttgttcaccacttggtgctggaccaccccggcgcggtcgatcaggaacgaagcacgcaaggccacgccgtcctcgtgctcgatgccgtaggcgcgggtgatctcgtgcttgacgtcggcgaccatggtgaactcgaccgcaccgatgccgcccttctccaccggcgtgctgcgccaggcgtgatgggtgaactgcgagtcgatggagacaccgaccacctcgacgcccagctcgcggaacttatccatgcggttattgtgggcgatgatttccgaggggcagacgaaagtgaagtcgagcggccagaagaacagtacgacgtacttgccgcgcaggctggaaagctggaaggcatcgacgatggaaccgtcgccgaggaccgcggcggaagtgaaatcgggggcttgcttgttgaccagtacgctcatcgcgaggctcctagaaggttgggttccgcccggcgacgccaggctcccggaagaatatgcagcgcaggttacccagccacgacgatgcattgaaatgtcgaatttcaattcgcacgatagagtcagcctatgctctcaacctgcggctagactcatgctgtcgcccattacccgtcctcaccgcatgcccctacgcacacgcctgctctggctgttcctgccgttgctggccgccagtctcggcggtatctggctcttgtcggaaagcatcctgctgagccgtttcgaccgagaggaccagcaacgcctgcaagagggcgccaccgtcctgcacaaccggctggacttcgagttgaagcgccacttggacatcgttcgcacctacgcttggtgggatgccagctacgacttcatccagcgccccaacgagaccttcgaacaggaaaacctcgaccacgagatgctcgacgacctgggattcgacttcgtcctgttcctcgacgaccggggtcacctgcaactgaagcagtggtccccgcccgcgcccgaccagcgcgtgctcttcggcgccccctcggcgagcgaccaggccctgctcgaggcactgcagcaacgcgccatccgcctcggcgcgctggactttcgcggacgcaccgaccacagcctgagcgagctgctgctggtcgacaacctgccgaccctgctggtcagcgtgcctatcagcaacaaccagggtagcgcgccggcgaagggcgcgatcctcgccggctacttcctcgaccgggaacgcctggccaacctccgcgaacagatgcaggccgacctgcaaccgatgcccaacatcgccaccgactccacctggaagccgatgcgcagccgcagcggcagtacccacaaccaggccctgctcagcccacggcggttcatcggcgaacatgtccagcaggtctcggtgcagtacctgagttccagcggcgagccgcagctgcgcttcgacatcaccaagaaacgcctgctctacatccagggcgagaaggccatcaacttcttcctcggcgcctccctgctggtcgcgctgggcgctttcctggtcggctacctggccctggagctgtgggtcctgcgccgggtccaacggctcaaccgggaggtcgccgaagtcggacgcaacgcccactcgatacgcctgagcgacttcggcaacgacgagctgggacaactggcgggcgagatgaaccagatgctcgagcgcctggaacacagcgaggcgcgcgaccgggcgatcctccagtcgatgcgcgacggctacttcgaaatggacgtcgacggcgtgatcctcaccgtcaaccccgcgctctgccaactgctcggccagacgcgcgaaacgctgatcggccatccctactacgaactgctcggcgaagacgacctggcgcgtgcccgccaacccttccagcgcgccatgcagagcggcgcaggcaagaccttcgccatccccctgcagcgcgccgacggcagcctcggctacttcgaggccacggtttcgctgatccacgacctgcagggcgaactacggggctaccgcggcatcgtccgcgacgtcagcgaccagatcgcctaccagcagcaattgctggaaatggcgtaccgcgacccgctgaccggcctgggcaaccgcaaggccttcgacgaacagctcggccaggcgttgcttcgcgccggctccggcggaagcgaactggcgctgctgtacctggacctggaccgcttcaaggaggtcaacgaccgcttcggccacgacatcggcgatgccctcctcaggaccgtcgccgaacgggtacgcagcaccctgcggcagccggacaaggcctaccgcctgggcggcgacgaattcgccgtgctcctcgaggacagccaggaaaacaatccgcagcgcctcgcagaacgcctgctggcggcgctggtccaaccgatcgcgctgaatggcgaacgcatcgacttcgtcaccccgagcatcggcatcgctctctacccgcggcatgccggcgatgccgaaggactggtccgtgccgccgacagcgccatgtacgaggccaagcgccagcgcaaccactattgcctgtaccaggcgccagcctgaaatgcgcggtcaaacaggctctgtcgcgggctttcgccagtctgctaaggtttcagcccgcatcccatcggagaaccattccctatgccagccctgagcggcccgcaatacctcggcgaaggcctgaagctgatcatgcgtcccggcctgcgcctgttcgtgctgatccccctgaccctcaacctgctggtgttcgccctgctgatcggcttcgcgatgcagcagttcagccactgggtcgacctgctgatgcccagcctgcccgactggctgagcttcctgcagtacatcgtctggccgttgttcgtcctgctggtgctggtgatcgtgttcttcaccttcaccatggtcgccaacatcatctccgcgccgttcaacggcttcctctcggaaaaggtcgaggtggtggttcgcggccgcgacgacttcccgccgttcagctgggccgaactgctggcgatgatcccgcgcaccatgggtcgcgagatgcgcaagctcgcctacttcctgccgcgcgcgctggtgctgctggtgctgagcttcgtgcccggggtcaacctgatcgccacgccgctgtggatcctcttcggcatctggatgatggcggtgcagtacatcgactatccggcggacaaccacaagctcggctggaacgagatgctcgcctggctgcgcagcaagcgctgggcgtgcatgggtttcggcggggtgacctacctggcgctgctgatcccgctggtcaacctggtcatgatgcccgccgccgtcgccggcgccaccctgttctgggtccgcgaggaaggcgagaaggcgctggtgaaataagcatgcgcccggtgtccgctgtcggcattgtcaggcgggcgtcagcgccctgacagccggcgtcgggcacactacgaatgccctcgggagcgtcggcgcaggccgcagccgagacctgcgccagcccttgcagaccggctcgacgctgccgaaccgactggccgccggtgcctccccacgcaggcggcctttttttacccgcctgccttgccgtccatgcaggatggccggcgctcacccccttcctgtccgctacgcccccctcgactccaccaccctggcactacagtggcaaccaggcgaagcaggccccggcccgctttcgatgaccaccgtccccagcccgcccagcggcggaaaacaagaagagggtcgccatgtcacgttcctcattcaccgcgctcttgctgtcctgcgtcctgctggcgctctccatgcctgccagggccgacgacctgccctaccgcttcggcctgggcaaggcggacatcaccggcgaagccgccgaagtcggcatgatgggttactcctccctcgaacagaagaccgccggcatccacatgcgccagtgggcgcgtgccttcgtgatagaggaagcggccagcggacgtcgcctggtctacgtcaacaccgacctggggatgatcttccaggccgtgcacctgaaggtcctggcccggctcaaggcgaagtaccccggtgtctacgaccagaacaacgtgatgctcgccgccacccacacccactccggtccgggcggcttctcccactacgcgatgtacaacctgtcggtgctcggcttccaggaaaagaccttcaacgccatcgtcgacggcatcgtccgctccatcgagcgggcccaggccaggttgcagcccggccgcctgttctacggcagcggcgagctgcgcaacgccagccgcaaccgttcgctgctgtcgcacctgaagaatccggacatcgccggctacgaggatggcatcgacccgcatatgagcgtgctcagcttcgtcgacgccaacggcgagctggccggcgcgatcagttggttcccggtgcacagcacctcgatgaccaacgccaatcacctgatctccccggacaacaagggctacgcctcctatcactgggagcacgacgtcagccgcaagagcggtttcgtcgccgccttcgcccagaccaatgccggcaacctgtcgcccaacctgaacctgaagcccggctccggtcccttcgacaacgagttcgacaacacccgcgagatcggtctgcgccaattcgccaaggcctacgagatcgccggccaggcccaggaggaagtgctcggcgaactggattcgcgcttccgtttcgtcgacttcacccgcctgccgatccgcccggagttcaccgacggccagccgcgccagttgtgcaccgcggccatcggcaccagcctggccgccggtagcaccgaagacggtccaggcccgctggggctggaggaaggcaacaatccgttcctctcggcccttggcgggttgctcaccggcgtgccaccgcaggaactggtgcaatgccaggcggaaaagaccatcctcgccgacaccggcaacaagaaaccctacccctggacgccgacggtgctgccgatccagatgttccgcatcggccagttggaactgctcggcgcccccgccgagttcaccgtgatggccggggtgcggatccgccgcgcggtgcaggcggccagcgaagcggccggtatccgccatgtggtcttcaatggctacgcgaatgcctatgccagctacgtcaccacccgcgaggaatacgccgcccaggaatacgaaggcggctcgaccctctacggcccctggacccaggccgcctaccagcagttgttcgtcgacatggcggtggcgctgcgcgaacgcctgccggtggaaacctcggcgatagcgccggacctgtcctgctgccagatgaacttccagaccggagtagtggccgatgatccctatatcggcaagtccttcggcgacgtgttgcaacaacccagggaaagttatcgcatcggcgacaaggtgaccgtcgctttcgtgaccggacatccgaagaatgacttgcgcaccgagaagactttcctggaagtggtgaatatcggcaaggatggcaaacagacgcccgtgaccgttgccaccgataatgactgggatactcaataccgctgggagagagtgggtttatctgcctcgaaagcgactatcaactggtccattccaccagggaccgagcccggccattactacatcaggcactacggcaacgcgaagaacttctggacccagaagatcagcgaaatcggcggatcgacccgctccttcgaggtgctcggcaccactccctagcgggctccagccaaggttgcgagattcgccagccaactttatgacgcatgaaagtcgtcaaataaaatgtgatttaaacacatgaacaagtgacctttcattcagccgacaagggcatggaactccatttccatgccctttgtttttatcccgaaaaacttctcaagttgtcgctcaaggtcatatcgaagtcgctctcgggatcaaccgataaattatcgccatgaaaccatcggctcgctgtattccctgccggaaaaacagcgaagacgattaatcatctcgaaacaagaagtacgcagattgatggaaatcaaaaaaccacccgggaaataaaacgatgaccgaaaactggaaattccgccgtcgaacctttctcaagcacggcgcccaggccgctaccctggccggcctttccgggctgttcccggagacgctccggcgcgccctggccgtcgagccggacatccgcaccggaaccatccaggacgtccagcacgtggtcatcctgatgcaggagaaccgcagcttcgatcactacttcggccacctcaacggcgtccgcggcttcaacgaccctcgcgcgctcaagcgccaggacggcaagccggtctggtaccagaactacaagtacgagttctccccctatcactgggataccaaagtcaccagcgcccagtgggtgagttcgcagaaccatgaatggtcggccttccacgcgatctggaaccagggccgcaacgacaagtggatggcggtgcagtaccccgaagccatgggctacttcaagcgcggcgacattccctactactacgccctggccgacgccttcaccctgtgcgaggcctactaccagtcgatgatgggcccgaccaatccgaaccgcctctaccacatgagcggacgcgccgcccccagcggcgacggcaaggacgtacacatcggcaacgacatgggcgacggcaccatcggcgccagcggcacggtggactggaccacctatcccgagcggctaagcgccgctggcgtggactggcgggtctaccaggaaggcggctaccgctcctcgtcactctggtacctgtacgtcgacgcctactggaaataccggctccaggagcagaacaactacgactgcaacgccctcgcctggttcaggaacttcaagaacgctccgcgcgattcggacctctggcagcgcgccatgctcgcccgcggcgtcgaccagttgcgcaaggatgtgcaggagaacacgctgccgcaggtgtcctggatcgtcgcgccctactgctactgcgagcatccctggtggggcccctcgttcggcgagtactacgtgacccgggtgctcgaggcgctgaccagcaaccccgaggtctgggccaggaccgtgttcatcctcaactacgacgagggcgacggcttctatgaccacgccagcgccccggtgccgccgtggaaggatggcgtcggcctttccacggtcagcaccgccggcgagatcgaggcatccagcgggctgcccatcgggctcggccaccgcgtcccgctgatcgccatctcgccctggtcgaagggcggcaaggtcagcgccgaagtgttcgaccatacctcggtgctgcgcttcctcgaacgccgcttcggcgtcgtcgaggaaaacatctcgccctggcggcgtgccgtctgcggcgacctgacttcgctgttcgacttccagggcgcaggcgatacccaggtcgcccccgacctgaccaacgtcccgcagagcgacgcgcgcaaggaggacgcctactggcagcagttctaccggcccagccccaagtactggtcctacgagcccaagagcctgcccggccaggaaaagggccagcgccctaccctcgcggtgccctaccagttgcacgccacgctggccctcgacatcgccgccggcaagctgcgcctgaccctgggcaacgacggcatgagcctgccgggcaatccgcagggacactccgctgcggtattccaggtgcagccgcgggaagtcggcaatccgcgcttctataccgtgaccagctatccggtggtccaggaaagcggagaggaactgggccggaccctcaacgacgaactcgacgacctgctcgacgccaacggccgctacgccttcgaggtgcacggccccaacggcttcttccgcgagttccacggcaacctgcatctcgccgcgcagatggcgcggcccgaggtatcggtcacctatcaacgcaacggcaacctgcagttgaacatccgcaatctcggccgcctgccgtgcagcgtgacggtgacgccgaacccggcctatacccgggagggcagccgtcgctatgaactcgaaccgaaccaggcgatcagtgaagtgtggctgttacgcagcagccagggctggtacgacctcagtgtgaccgccagcaataccgaagccaactatttccgccgcctggccggacacgtcgagaccggcaagccgagcaggagcgatccattgctcgacatcgcagcgacctgaagcgaggagtccatcgcatgagacctaccctgacctggaccttgctggccctgctgctctgcggcacggccatcggcgccgtcctgttgctttacccatcggagccggcgcccgtcgcgcccttcgcgtctcccccgcaggccacaccggcggcaaaaccttccattccttcccgagcccccgagatgaatacagccaccgctcccgacaacctggaacagcaactcggcgagttcggccgcaacgccgggcagatgtccgagatcgaacgcaagcaggccgccgaaggcctgatcgaacagctcaagcgcgaggtggcggtcggcgccgatccgcgccagaccttcgaggagatccagcgtctgacgccctatgtggaggccgatgccaggcgccgcgaggcgctcgacttcgagatctggatggcgctcaaggacaacgcctccgtccagcagcaagcgccgacgcctggcgaggaagagcaactgcgcgaatacgcgcaagagtcggacaaggtgatcgccgaggtgctcgccagcgtcgacggcgaggagcagcgtcacgccgccatcgacgaacgcctcaaggccctgcgcaagcagatcttcggcgaggagaacccacgcctgctgcaacgctgaaatccacggcgccccgacaggggcgccgtcacgcaagcgtcaccaaaacttcacatccgctacacggcgtcggtcgacactgacgtcatgagcagacctctaagcatcgccctgatcagcgaaacctacccaccggaagtcaacggcgtcgccaataccctggggcgcctgcatgccggtctccagcagcttggccatcgggtccaggtggtgcgcccgcgccagcccggcgacgacggccggcgcagcgacgccgagctggtgctgacccgcggctggccgttgcccggctaccccggcctgcaatggggcatgtcgagcctgcacaagctgctgcgctgctggaagcgccagcgcccggacgtgctctacatcgccaccgaaggcccgctcggcttctctgccctgcgcgccgcgcggcgcctgggcatcccggcggtcagcggcttccacaccaacttccagcagtacagcgagcactacggcttcggtccgctgacccggctggtcaccggctacctgcgctggttccacaaccgcacgcagatgaccctggtgcccagcggcagccagcgcatggaattgcagcggcgcggtttcgaacgtctcaacctgctctcccgcggggtcgacagccaactcttccatccctcccggcgcgatcccgaactacgccggcgctggggcctgggcgaacaggacatcgccgtgctgcacgtcggccggctggcggcagagaagaacctcggcctgctcggcggcaccttccgcgcgctctgcgccgcccatccgcagctgaagctgcgcctggtactggtgggcgacgggccggagcgcaggcacctcgaacgggacctgcccgaagcgctgttctgcggcgtccagcgcggcgaaaccctggccgcccactacgcctcgggcgacctgttcctcttcccaagcctgtcggagaccttcggcaacgtggtcctcgaagcccaggccgccggcctcgcggtggtcgccttcgaccaggccgccgccggccagcacatccgccatgggcacaacggcgtgctcgccgcgccgggcgacaagagcggcttcgtcgaagtcgccagttggctgctggacgaccaggaacgcctgcgccgggtccgtctcaacgcccgccaacacgccagccggcaaggttgggacagtatcgtcgagcacttccagaactacctggaagacgcctgcgccagtccgctggtccagcccgctcggtcgaagcccgagcggccgccggcagaggatggcggggccttgccacgcagccgcgagtagctctcaggcaaaggctttcggcgtggcgatgaagcccaggctcatggccccggcgcccaggttgatgccgccggtagggctgagcatgcccaggtgcaagtggatgtcgcgctcgcggcaggcgttctccagcgcggcgaagcccggcaggtcgcgcagcgcggtcggatcgccggcatagctgagacccagttgcggtgccagcagctcacccgcctgtacccgcgccagggcatagccgaacagcttctccgccgacttctcgaagctcggcgagagcgccaccggtttgtcctcgccatcggccaggctgaacaccggcttgacgtcgagcagcgagcccaaccccagcgccgcgcccttgacccggtcgacgaaaccgctgcgatcacccttctggaagccgcgccggcgcaagtggcccaggtcatcggcgaccaggtaggtgcaggtctgctggctgagctgttcgaggcgcgtacgcagcgcgttggggtggctgccctgcgccagcaggcgcgtgccctcggccgccaggcaggcgatgccggcgaacaccgagtggctgtcgagtacgcgcagggtgaagggaccggcgatgccggccgcgtggcggcgctcgtggtaatgctggagcaggccgaaggaggcctgggtggcgtgctcgaagatcggactgcgcaggctgtcgacggtgaggcagaccacgtagtcgaagtcggtcaccagttcgtcgaggaaccattgttgcaactcggcggcggagagcggctggctgccgtccttgctaccgaccttgggcaggtggtcgcggtagaagctcagggtggtgtcggggtcgcgtcgatcgatgagccgctgctcgcccaggcggatcccgatcggcatcacgcggatgccgtgggcggcgaggaattcgggcggcaggtcgcaggtcgcgtcgaccaccaggccgatacgcatggattcgctcctctggccgtttctcggcctattgttgtgttggcggtcatacaatgccggtttcggactttgaagtcagccggccgcacggcgggttttcggaaaaaatcacggccatgaaaaatcccaccccgaggggtgggatctgcttgccggcgcggcgccgggccggtgcgtcgcggacgcgccttcagaccaggctggccagggcctcgcggctgaacggcttgatgtcgccgatacgcccctcgcggaccttcaccgcccactccggatccaccagcagcgcgcggcccaccgcgaccaggtcgaactcgcccttgtccaggcgctccaccaggccgtcgatgctcgccggctgcgccacctcgtcggttttgccgaagaattgcaggaactcgctgccgtccaggccgacgttacccacggtaatggtcggcttgccggtcagctcgcgggtccagccggccaggttgagttccgagccttcgaactcgggaatccagaagcggcgggtcgagcagtggaagatatcgacgccggcctccaccagcggcgcgaggaactcgcgcaggccctccggggtttccaccaggcgcgcggaatagtcctgctgcttccattgggagaagcggaagatgatcgggaaatccgcgccgaccgccgcgcgcaccgcccgcaccagctcgacggcgaagcgcgagcgattggccaggctgccgccgtactcgtcgtcccgctggttgctgccttcccagaagaactggtcgatcaggtagccgtgggcgccgtggatctccaccccgtccatgccgatcgcctgggcgtcgcgggcggcctgggcgaaggcggcgatgacgtcctggatgtcggccttactcatgccgtggaccagcaccttgccgtccttggccttctccatcgggccgtagccgggcacgctggcgtccggctccacgcccaggcgccgaacgctgccgacgtgccagagctgcggaacgatgcgcccgccctcggcatgcaccgcgtcgaccacctgcttccagccggccagggcgtcctcgccatagaagcgcggcacgttcggatagccgttggcggccttgtggccgaccgttgtgccttcgctgacgatcaggccgacgccggcggcggcgcgccggcggtagtactcgacgaccttggcgttgggtacgccgccgggggaaaagttgcgggtcatcggtgccatcaccacacgggtgggcagttccagggcgccgaggcggaacggttggaacagggcttctacgggggcactcatggacggactcctgagggggaatgggaggttcgggcaggtatcaggcgcggagcagcagctccaggcgcgacatgaaagcattcagcggagcgaggccggcgccgaccttgaagcgcgccagggcgccctgccaggcgaagccgatgaagccggccaggctcgcgcagtcctcgtcggcggccagttcgccggcctcgcgcgcctgctccagacagtcctggaggattcgcgcggaagcctgcaggatcgactcgaccttggccgcgatcggcggcgacagctcggccatctcgaagctcaggctgccgatgaagcagtggtattcgggcttttcctggcgggcgaagtgctccagcagctcgccgtagtagcgcagcacccgctcgcgcgggctgaagcggctatcgccgagggcctgggcgtagcgcgccaggcgcggcgcgtagacgtgctccagggcctgctgggcgaaagcttccttgctatcgaagtagtgatagaaggagcccttggggatgcgcgcggcctggacgatctccagcaccccggtgccgtggtagccacgtcgggtcatgacctcggagcccttggccaggatcagttcgcgcttgtcgagtcggttgctagtcatggaacgagagaatatgaccggtcgtctcgtccgcccagcattatcaacggcggtgatcaggcgttacaggcaggggcttatcgcgttgcgtcatgaagcggcgcaagacaggaaaggaagcggcgggacgcgaacgcgtcccgcgggagatcaacccagggccttctcgatggcttgcaccagggccgggtcgtccggcgccgtgcgcgggctgaaacgcgccagcacgcgaccgtcgggaccgagcaggaatttctcgaagttccaggtgatgtcgccgggaaactccgcgccctcgcccgccagcaggcgatagagcggatgccgcgcgctgccgttgacctcgaccttggcgctcatcgggaagctgacgccatagttcaggctgcagaaggactggatatccgcctcgctgcccggctcctgcccggcgaactggttgcagggcacgccgagcaccgcgaaaccgcgctcgcggtaggtctggtagagattctccaggccggcgtactggggtgtcaggccgcatttggaggcgacattgaccaccagcagcaccttgcccttgaacggggaaagcggcaggtcctgtccatccaacccctgcagggtgagatcgtgaaaggcactcatgacgtactccttgcgcattcagcgacacaacgtgccaagccccgcaccgggcaagaaccctggctgcggcgcatccccagggacggggtaaagagcccaggcatggcgcatgacgcgaaaggcgcccacaggcgcctttcgctataccagcttagcagttccgccggcggacggcccaggccatcaatcggcgaatgaacgccgatcagtggtggtgaccgccttcgccatggatgtggccgtgggcgatttcctcggcgttggcctcgcgcacgtcgactaccttgaccttgaagttcaggcgctggccggccagcggatggttgccgtcgacggtcacgtcgtcgccgtcgatgtcgcggatggtgacgatctgcatgccgccgtccggagccgaggcgtggaactgcatgccgacttccagttcgtcgacgccttcgaacatctcgcgggtcagggtcgcgaccagttcggcgctgtattcgccataggcgtcttccggctcgatggcgacgctcagttcgtcaccgacgttcttgccttccagggccttctccaggccgacgatgatgttgccggcaccgtgcaggtagaccagcggcgcgccaccagcggaactgtcgatgacatccccggcgtcgttggtcagggtatagtcgatggaaaccgccttgttggccgcgatctgcatggttcgaaaccttttcgataaagaagatgaatgcgtaagtgtacgcatcaatagccccgaaagcgaccgcgcccctgatgaacggggcgcgcgagcgccgtcgcgggtgattgattttcatcaggacgaggaaggccattgggtggcagtcttgtcctgtggccatactcaacacctgcgccaccaaccgccctggcaatcgcgcgcctgggtccttgacgaaaacgagcggcacagacagctcggccgcgaatttcgctgcggctggtgtgcccgggaagaagaagagcagaccaaggagcagtgatgccctcacgcaacatactggtgatcaactgcggcagttcgtcgatcaagttcgccctggtcaacgaggcccactccctgtttcccctgcacggcctcgccgagcgcctgggcagccgcgatgcggtgctgcgctggaagcgcggcggcgacagcgacagcctgatgattcccaacgccgaccaccgcgccgccctcgcccagttgctgccgatggtgcagaacgccgcgggcggcaagctccacggcatcggccaccgggtggtgcatggcggcgagctgttcacccatgccacgcgcatcgacgaccgggtggtcgaggcgatccgggccaccgcgccgctggcgccgctgcacaacccggccaacctgcaaggcatcgaggcagcgatgacgctgtttcccaagcagccccatgtcgccgtgttcgacaccgccttccaccagagcctgccggagcacgcctaccgctacgccctgccggaagccctctaccgcgagcatggcgtacgccgctacggcttccacggcaccagccaccgctacgtcagccaccgcgccgcggaaatggccgggttggcggtcggcgacagcagttggctcagcgcccacctcggcaacggcagttcgacctgcgccatcgtcaacggccagagcctcgacaccagcatgggcctgaccccgctggaaggcctggtaatgggcacccgcagcggcgacgtcgaccccaacctgcacagccacctggcgcggaccctgggctggagcctggagcgcatcgactcgatgctgaacaacgaaagtggcctgctcggcctctccgacctgtccaacgacatgcgcaccctggagcaggagcgcgagcagggccaccccggcgcggccctggcgatcgaggtgttctgctaccgcctggccaagtccctggcggcaatgagctgcgccctgccgcaactggacggggtgatcttcaccggtggcatcggcgagaactcgccgctggtgcgcgccaagaccgccgcccacctgcggctgttcgacctgcgcctcgaccaggaggccaacgcccgctgcgtgcgcggcgtcgccgggccgatccaggccgcggggcatccgcgggtactggtgatcccgaccaacgaagagcggcagatcgccctcgacacgctggccctgctcgactgaactggatcgacgcccccgcccaaccaggcggcgtggccaaacgcacggcttaaggagcccagatgcataccttcttcatcgccccgaccggtttcggcgtcggcctcacctcgatcagcctcggcctgcttcgcgccctggaacgcgccgggctgaaggttggcttcttcaaacccatcgcccaactgcatcccggcgacctcggcccggagcgctccagcgaactggtggcgcgcacccacggcctggatacgccgaagccgctgccgctggcccaggtcgagcgcatgctcggcgacggccaactggacgaactgctcgaagagatcatcagcctctaccagcgcgccgccgccgacaaggacgtggtgatcgtcgaaggcatggtaccgacccgtcacgccagctacgccgcgcgggtcaacttccacctggcgaagagtctcgacgccgaggtgatcctggtctccgcgccggaaaacgagacgctcaccgaactgaccgaccgtatcgagatccaggcccagctgttcggcggcccgcgcgatccgaaggtgctgggggtgatcctcaacaaggtccgcggcgaggccgacgcggccaacgccgaggacggcgtggcggacttcgcccggcgcctcaccgaacactcgccgctgctgcgcgacgacttccgcctgatcggctgcattccctggcaggacgaactcaacgccgcgcgcacccgcgacatcgccgacctgctcagcgctcgggtgatcaacgccggcgactatgagcagcgccgggtgcagaagatcgtgctatgcgcccgcgccgtgcccaacaccgtgcaactgctcaagcccggcgtgctggtggtgacccccggcgaccgcgacgacatcatcctcgccgccagcctggccgcgatgaacggcgtacccttggccggcctgctgctgtgcagcgacttcccgcccgacccgcggatcatggaactctgccgcggcgccctgctgggcggcctgccggtgctgtcggtggccaccggctcctacgacaccgcgaccaacctgaaccggatgaacaaggaaatcccggtggacgaccgcgagcgcgccgagcgggtcaccgagttcgtcgccgggcacatcgatttcgaatggctcaagcagcgctgcggcacgccgcgcgagctgcgcctgtcgccgccggcgttccgctaccaggtggtgcaacgcgcgcagaaggccggcaagcgcatcgtcctgcccgagggcagcgagccgcgcaccgtacaggcggcggcgatctgccaggcgcgcggcatcgcccgctgcgtgctgctggccaagccggaagaggtccaggcggtggcccaggcccagggcatcgtgctaccggaaggcctggagatcatcgaccctgacctggtgcggcagcgctacgtcgaaccgatggtcgagctgcgcaagggcaaggggctgaacgcgccgatggcggagcagcaactggaggacagcgtggtcctggcgaccatgatgcttgccctggacgaggtcgacggcctggtctccggcgccatccacaccaccgccagcaccatccgcccggcgctgcaactgatcaagaccgcgcccggctacaacctggtgtcgtcagtgtttttcatgttgttaccggaccaggtgctggtctacggcgattgcgcggtgaatcccgatccttcggccagtgacctggccgagatcgccgtgcagagtgccgcgtcggcgcaggctttcggcatcccggcacgggtcgcgatgatcagctactccaccggcgactccggttccggggtggatgtcgacaaggttcgcgaggccacccgcctggcgcgcgagcagcgccccgacctgttgatcgacggacccttgcagtatgatgccgccgccatcgccagcgtcggccgccagaaggcgccgaacagcccggtggccgggcaggccacggtgttcatcttccccgacctgaacaccggcaacaccacctacaaggcggtgcagcgcagcgccgattgcgtcagcgtcgggccgatgctgcaaggcctgcgcaaaccggtgaacgacctgtcgcgcggcgcgctggtggaagacatcgtctacaccatcgccctcaccgccatccaggcggacgcccaggccccggcctgaaggaacgccgcccagtgggcggcactggcttcggccaggcacgaggatgtgccatgtgaacggcgggaccacgccccgctccacgcgcccggccctggccgggcgcctacgtacaaggactccttgatgctgtcgtttctcccccatttcctgcgcggctccctggccggcctgctgctggtgtccagcaccctgtgctgggcctgcctgctgttcggcatgaccctggtcaagctgctcctgccgttcgccgccgcccagcgcctgtgcagcaagatcatgagcctgatcgccgaaggctggatcgcctgcaacaagggctggatgaacctggtccagcgcacccgctggaacgtccagggcctggagggcctggagtaccaacactcctacctggtcaccagcaaccaccagagctgggtcgacatcctcgtcctgcaataccagttgaaccgacgcatcccgctgctgcgcttcttcctcaagcaggaactgatctgggtcccgatcatcggcctgtgctggtgggccctcgatttccccttcatgaagcgctacagcaaggcctacctggccaggcacccggagaagaaaggccaggacctggcgaccacgcgcaaggcctgcgccaagttcagccgcatcccggtagcggtgttcaacttcctcgaaggcacccgtttcacccgcgccaagcacgacgagcagcagtcgccgttccgccacctgctcaagcccaaggccggcggtatcgccttcgtcctcgacgccatgggcgagcaattgaagaccctggtcaacgtgaccatccactacccggacggcagcccgaccttctggtgcctgctttccggacgcctgaaggacgtcgtggtgcgcttcgaggaactggagattccgcgccagttcgttggcaagagctacgaccaggacgccggctaccgcgcggaattccagcaatgggtcaaccagctgtgggagcgcaaggaccagttgctcgacagcctgcaccgcgagtttcccggtaacgccaaggcgtaggacgaagagcgccgaccagcgcccatgaaaaagcccgccaaatggcgggctttttcgtccaggccgcgatcagtactgcggctgggtctgcgccgggccctgggcgcccggaaccggtcgcaggttgacctcgacacgccggttctgcgcgcgaccgtcggcagtggagttgctcgcgatcggctggtccgggcccatgccgcgggtgctcaggcgggtgccgtcgacgccctgggcggtcaggtagccggccacgctctgcgcacgacgctgggacaggtccatgttgtgctggcggctgccggtgctgtcggtgtagccgacgatctcgatggtgttctggttgtactgcttgaacgagttcgccaggttgttcagcggcgcgtagaagctcggggcgatgttcgccgaatcggtggcgaaggtgatgttgcccggcatgatcagcttgatgtcgtcaccttggcgctgcacttccacgccggtgccttccatctgccgacgcagctcggcttcctgcttgtcggcgtagtagccataacccgcggcggccgcgccggcaacggcagcgccgatcagcgcgcccttgccacggttgttgtggtcgatcgcagcgccggcgacggcgccggccagcgcacccagtccgccgtacttggccgtcttgctcatgccaccctggctttggctttgcgtgtcgtaggggttgttgttggcacaaccggcgagcagcgccagtgcggtgacggctgcggccagaggcaggcaacgggaggtgaacatgggaaaactactcctcgaggtactgaaacgcccctgcgtgaggggcggccgatatcttagagcatagccaagtggcaaaattcccgatgctcggaaaaatccttttcagcccctgacgaaggggttctcgcgcatctcttcgcccagcgtggtgtccgggccatggccggcgaccaccgtggcgtcctcgtcgaggctgtacaggcgctgccggatcgaacgctggatcgccgccgagtcgccgccccacaggtcggtgcggccgatgccacggcggaacagggtgtcgccggcgatcagcagcttcgcccgggggaaccagaaactcatcgagcccggcgtatgccccggcgtgtgcagtgccactccgcaaccgcaggccagttcctcgtcgtcggccagccagcggtccggggccggcaccggcgtgtagggcacgccgaacagttggcactgcatctccaggttgtcccagaggaactggtcgtccttgtgcaggtgcaggctggcgccggtgcgcttcttcatctcgccggaggcgaggaagtgatccaggtgcgcgtgggtatggatgatgctgaccacctgcaggccgaggcggtcgaggcgctgcaggatcagttcgtggtcgccgcccggatcgacgacgatggccttcctggtcagcggatcgccaatgatggtgcagttgcactgcaaaggcccgacgggaaaggtttcgcggatcagcgcgggggatgtcgacatgcaagactccgatcacggtcggcgcggcaagcgcgccatggatttctatgaaacgccaagcatggcacatccatccgctgccgaggatcgccggcgtcggctcagggcgcttcgcggtagtcgctgggcagcttgccggtccacttgcgaaacgcccggcggaagttcgacgaatcgttgaagccgagcagcagggcgatctcgtacagcggtagctgggtggtggtcaggtattgcagggccaggcgcttgcgcacatcgtcgaggacctgctggtaggtggtgcccaacgacgacaggtgccggcgcaggctgcgcccgctggtgtgcagttcgcgggcggcctgttcgagatcggggaagtcgccgggacgcgccagcagcaggcggcgcacacgggtcagcaggccttcctggacgtccagggtggccagcagcgcctcgcactgctgctcgcacatctgcaccgtggccgggttggccagcgccatcggtcgttccaggtactcgctgggcatgctcagccagtgccagggctgctcgaactccgcggccaccccgaacacctcggcgtagcgccgggcatgggccggcggcggataggcgaagccgacccgcacgtcctgcaacggctcgccgaccaggaagcaggcgatggaatacagcgtcgccatcaggccctcggcggcgaacaccgaagcggcgcccagcggcatcgactccaccgcgcgcaactcggcgcggccgtcatcgagcaccagttccagttcgtaggccaggccgagcacccggtagtacttgagggcgaactggatggccttgcccaggttggcgctggacagcaccgcgtagccgaggatgccgtgggcggagacgttcaggcgctggccgagcaccagccccagcgccggctcgccgcacagggcctgggcgctgtaggtgagctggttgaagtcgaggaaggacaggcggccgttcgggctgtccagcacctcgggacgcacccgcgcagcgtcgaacagcgcctggcgggatacgccgtactccgcgacaagatcgaggagtgcctcggcataggccaccggcaccagttcggcggtgaaattgagcggttgtttcatggttgtttattgttctgaccgctggccggatatgaccggaaagttggcagaagataaccttgtgaggctatcccccgcaagcgatagtcgatcccatggtccttcaccatcacagggagccgctatggccagcaccacccccgaaggtctggagatccgcccgcgtcatctggacttcgacctgcccgatccgatgccgcgccattggcacagcggcgacgctttcaagacccacatgttcaacgccatgtcggtgctgttccccgatggcgagcgcttcttcatcgactccgtgcgccactaccgcgaacgggtcgaggacccggcgctgaagcaacagatccgtggcttcatcggccaggaaggccaccacagccgcgagcacctggtctacagcgaccgcctgcgcgccctcggctacgacatcgaccgcctggaaggcggcgccaaacggcgcatccgcttcgcccagcagaaactgcacccgtcgcggcaactggcggccaccgcggccctggagcacctcaccgcgatcatggccgacggcctgctgagcaaccccaggtggctggaaggcgccgacccgaccatggcccgcctgtggcgctggcacgcactggaggaaaccgagcacaaggcggtggcctacgacgtgttcatgctggtcaacggcaaggccaggctgcgccgccgggcgatggtccagggcaccttcttcttcgccctcgacaccaccaagggcctggtccacatgctcaagcgcgacggcctgctgtggaacttcaaggtctggcgcgacggcatcaagtggctgtggggcaaggacggcgtgttccgctcgctggtgggcgtgtacctggacttctacaagaaggacttccacccctggcagcacaataacctgcacctcatcgagcagtaccgcgaccagttcgaaccggaaccgaaggccgcctgaccctcctcgccgcccctccgcgccgcgagaggggcatgcatcgtttccctgccctgcctggtatttcggcccttcgtccacgcattaaaaagcccgcgactgaccagcgcgggcttcttcatgacggcctgggatcaggccatcaggaagcgcagtgcatccgccgcggtctgctcgggaatctcctccatggggatatgcccgacgcccggataggtcttcacctggatccccggcaggtcgcgttgccacagcggtacatgcttcggcgagatccagcggtcgcgttcgccccacatcagcagggtcggcgcgacgatccgggcgatgcgttcgccggaggtgccgagttcctcgcggttgaccttcagcaacacgcggaagatctccatcatgcccttgcggttgcccgggcggcggctcaggtcgtagtagcggtcgaccacccccggcttgatccgccccggctcgccatagacttccttgatgccctgggcgatcagcgctcgcggcatccacagcggcatcgccagggtcgagccgggcagcgccgccgaggcgatcatccacggcaccttgcgcatctggtaaccggccgggtcgatcagcaccagccgctccacccgctgcggctgcgccagggcgaagttccaggcgatatagccgcccagggagttgccagcgatcgaggccttgtcgatcttcaggaaatcgagcaactggccgaggatcgccaccatgcgctcgccggagtaacggctgtcacgccccggcccggtcaggccgaagcccggcacgtcgaagcgcacgatgcggaagtagggcgacatcgccttcacccagtcgtcccaggtgtgcagcgaggccactacgccgtggatcatcaccagcaccggcttgtcgcggctgccttcgtcgcggtagtgcagcgggaaaccgtccagctcgatgaagcgcgagccgctggacggtgcggcgtagcgctcgcgcaacgactccagcgagagggagccgaagcccaggcgggcgaatccgaccgccagcggcggttgcagcagatagggtgtcgcggacatggacgcacgtctcccgtcttgttgttatgacagggcatcagagcatggccacggcgggctgcgagcccaacctaggttctgtaggcgcgagcggcgactgcccggctgttacccttgcagtctcgtcggagcctgggtgcggggacagagcgtacccaccagcaggtcgccgagcacccgcttgacccgcggcagctccagcgggtcgctggcattgagcagctccagcgaagccgcctccatcgcccagatcagcacccggtaggtcagcgcatcgtgggccgcaccctgggcgcccaggcgctcggcccacagctcgataatcttcaggtgcgcgcgctgccggtgcgccgccagcggcgagccggcatgcagggcctcctcctgcatcatgcggatgatcggaccgaccgccaggtggtagtcgaagaacagcgagaccatcgcccgcagccagtcctcgtcgctgccggcctcgctgcgcagcccgccgaagcgcgccagcagcaattgcacggcgctgtggtagatgctttccagcacctccagcttgccggcgaaatacttgtagaaagtccgccgcgagacccgcgccgcctccagcaggtcgttgaccgtggtctcggcgactcccttgcgggtgaacaccgggatcgccgcgagctggatgttggtccgttgcagatgccccaccagcggcccctcgccctgcgccgcctggcgcgccagcgcgccgtagccgccgagatcctcgaataccgcctgcaagccgtcccactgcgccgttgccatcccgtccgccccaatcgaagcgcggggtgacggcggccccggccatcgctaacctaggccgatccacgcgccccgcaaggaaagtccgtgccgaccctatcacgccgcctgctctggccgctggccatccttttactggttctcggccgcccgctcgcggccgccgacctctactacctcggccagcgcatcccggacatccagaagccctgggacagccacgactaccaggtgctgatcgacgccctgaagaagatcgaggaaacccagaaaaacgccctgccgcgacgcagcggcgaattcaccgggccgctctacctgcgcatggtcagcgaggaaaacttccgcccgcagctgaacatctacagccccttggagatccgccagaacgaggcccgcgaagtactgttcaagctcaaggagctgatgcgcctgtacttcgacttccgcgccgccaaacagccctacggcgccgaggcgctgggcctgatgagctactcgctgcgcgagcagtcgatcctgttcaccctcaccgtcgaattctggatgaccctgtcccaggccgagcagcgcaaccccgcgcgcctgcagggcatgcaggaaaccaaggcggccgcggcgatgctcaccggcagcgccctcgactacctcggcctcaccgcccagttcgagcgccaggacctggtgctctactccgccgaactggccaaggaaatgcccgagctgttcatccacctgccctccccggtgcgcgcccagttgctggaacgcatcgccgctttcgccaaggaccacccttaccccgaggtccgcgacaacatgcgcgacctgcaaccggtgttgcaggcgatccaggccgacgtggaaaaacaactggcgcccgggcggaacgccaaggcaccggacaaacccctggacctgagcccgcctccggaggggaaacccagcggcgtcaaaggtttatgagcggcggattggactctcgcagccctttgccgtagactggtcgtcgacctgtcaaggttttggggccgattaggattcgacgccggtaacaaaacttgaggggcatgccgagctggtagcagaactcgtaaattcgctgctgcaaacttatagttgccaacgacgacaactacgctctagctgcttaatgcggctagcagtcgctaggggatgcctgtaaacccgaaacgactgtcagatagaacaggatcgccgccaagttcgctgtagacgtaacggctaaaactcatacagctcgctccaagcaccctgccactcgggcggcgcggagttaactcagtagagctggctaagcatgtagaaccgatagcggagagctggcggacgggggttcaaatccccccggctccaccaaacgcaaacgataagcccctgattttcctagtgaatttcaggggctttttctttgcccagttccttgtctgctcctccagcgccgggcctttcctgttgccggctcgccttgctgctccctccctgtagtggtcaacccatcccggacagtgggttgagtttttcttcggccaccgcaggtggtaacccgtcgttgaattgatgcggcctgatccagttgtagcggtgcatcaagtaatgactgatgtcccgttgggcctcctgcgccgtcaggtaacccgttgacgggacccactccgacttcagactgcggaacaggcgctccatcggcgagttatcccagcaattccctcggcgactcatgctctgctgcatccgatagcgccagagccgttgccgaaacaggcggctggcgtactggctgccctggtctgaatggaacagcacctgctgtggcttgccgcgctgttcgtaggccatgtccagggccttgatcaccagttcggcatccggcttggccgagaacgcccagccgatcacccgccgggtatgcagatccagcaccgcggccaggtagtgccaacggccttgcgcccagacgtaggtgatgtcgccacaccacacctgattgggatgctcggtcgcgaattcgcggttcagccgattcgggatatccggccgctcaaccgtggcctgtttgtaggcgtgcgagcccggttgcttgctgaccaggcctagctcacgcatcaaccgacgcactcggaaacggccgatggtcacgccctcttcgcgcagcatgcccagaatgctgcggctgccggccgagccccgactctggctgaacaactggttgacttggctgcgtagcgccacgcggcgagcatcgacacgccgccgtcgaagacggtggacgtagtagcaagaccgcgccacatcgaaagctgaacagaccacttccaccgactcctgctcactcaactggtctatcagcgcgtacgatcgagttcgtccgacatcaagagagcggtagccttttttaggatcgctttctcccgctccaaccggttgatccgggcttccagctcctggatcttttgctgctcaggcgtcaacgccttgctcttcggggtcacaccctggcgctccgcctcgagctgcttcacccaacggcgcaaggccgaatccaccacccccagcgaacggcaggcgtcgatatggctgtagccttggtccaacaccagggccgcggcctctcgtttgaactcggcggaaaacgtacgtcgttgcttgctcatcagacacctctctcacggcgaggattttcgcctaaatcggtgtccgggatcagtagaccactacaaggcgagcctgacagaaaaataaatatgtcccctttttccttctttttccttacctaaacgactacatcagcctccgcccaaacccacctcccacgaacaagccccttcagctcatcgacgctaagagttcgatcacgcctgcgatgaacaactgcatggcaatttgcacagaggggcaccaggtcagtttcagggttcacggctttgggggcttcgaactcagaaatgggctgcgtgtggtgaacgtggataaaacccttcgcgtactcgccgtatgcctttccgaaatcaaaaccgcacgccttgcaagctacaccatgaatcgcaattgcttggagacgcagcgttgggtcacgctcgtagcggaccccgtagtaggtggacagactgccctcggtgcgagactcgaagccccccaaagctctatcgccccaactctcggcaacctgcaaaggcttaatctcggcccttgccaggatgctatcaaaggtgacctgtccaatctcccggacaccactacgccagtagttgctggccttcgatggcggaatgggctctaggtagctattcccttcttttgccaggactgcctgctcaaatggctgaaaactctcgatcaacgcgaagagatcacctttcgagctttcagggtcagggtaaaccttgccgatacgcgcaataccaaagtaatgcggctgagcactgaggcgctgatcagcaaaagacttatctgtcagcttgcccttgtagtaaaccacctgcacccctggcttaaggatggcgctgtatcgccttgggtagtggtagacagctccagtttcgtcgtcccagatcgacacatcattctcagcgataacggcgggcatagctgcagagtcctttcatgatggttgagcgacagcctatcaggcacctgcccaaaatcgaacctggcaaagagcgggagcaatgctcctctaccagaaacctatacctacttgagatcgttaggcatgtagcgaaaaggcatgcccaattcaccacaacagcctagccagacaaggcggatagtacggcacagacgctcatagttaaggcctgtgtgaattcggctcagtggacataccagctcacattagagactcatccaacccccggcctcgccgggggcaccgcctccgtcggttatcggtgtctgcgtgcgtattccgcctcgaacagcgacagcagggagccggtgatgcggcaggtgctttcgccggtcttcggtttcgtcgagcaggtcgaggacgctcagcattccgatcgccgactccagacgggtgcgggcggtgtcgaacagatcttcgctggctgcgctgcagtccaggtagagggtggcgcagccgggatgctggttgcattgcgaggtgcgtcgcagggggatgtaggtggaaggggactgtgcggtgacggttttgcctggacaaagcgccgctcgggcaaggtgcgaagcgcttcacaaaatgccaaacaaagggcgagcgcatcccatcgccaacacgcaatcgccttgaatggccgcttcgattcctcgtcatgcggggatgccgtgctcggctccagcgcatcgccacccacaccggaaaccctatgccctaccgcgttctcctgctcatcctggccctgacgcccgccctcgcctcctccgccaccctggacgaacgcctgggcgaccttgaacacgccttcaagcccgacctcgacgggacgacaagcgcaaagccggccagcccgccgccggagcggttcaagctggcgccgctgggcagcgtggtgcgcaagaaagagtgcgcgacatcgagcctaccggacgagcagtccagctgcgcggcgctggagttctgcacggactgcgcacagtaaggtggagcgccggcaatctcacttggcgaacaactggcccatgtcgcggaagctcttgaactccagcgcgttgccgcaggggtcgaagagaaacagcgtggcctgctcgccgacctggcccttgaagcggatgtagggctcgatcacgaagcgggtgccgcgctgctgcaggcgttcggccagggcgtgccagtcgtcccatgcgaggaccacgccgaagtgcggcaccggcacgtcgtggccgtccaccgggttgctgccggcgtggcgctgggagtcggtctgcgggtgctggtggatgaccaactggtggccgaagaagtcgaagtcgacccagtgctcggcggagcggccttcgctcaggccgaagacttcgccgtagaagcgccgggcggccggcaggtcgtggacggggatggcgaggtggaagggcatcaggctcatggcgtggttcctctgtgggtgtgccgggattatttgtcgtgccaatttcgatggaaagcgcataatatttcgcctgagcaacacttttttcgaggcttggatgatccgcgaactccgcaccctggtcgccgtggcgcgccggggctccttcgccgcggcgggggaacaggtggggctgacgcagtcggcggtgagcgcgcagatccgcgcgctggaacgcagcgtcggcgtcgagttgttccagcgcacgccgcgcgcggcgcacctgaacgaggccgggcggcaggcagtgcgtacggccgagcagatcctcgcgctgttcgacggcatcggccagggcgacagcccgcgcggacgcctgcgcatcggtgcggtgaacacggcgcagaccgggctgctgccggaggtgctcaagcgcctcgccgaacaggcgccgcacatcgagccgcaggtggtgccgggcgtctcgctacacctgctggaccaggtggacgccgccgaactggacctggcgatcctcatccgcccgccgttcaacctgccgcgcgggctctccgcgcaacgggtcgagcgccagccgttcgtgctgatcgcgccgccgcaatgcaccgcgacggatgcgctggaattgctgcgcacgcaaccgttcatccgctacgaccatgtgtccttcggcggtcgcctggtgggcgatttcctcgaggcgcagcagctcaggccgcgccaggtgatggagctggacgagatcgacgcgatcgcgcggatggtggagaacggcctcggcgtggcgctgctgccccgggccgggctgtggctacgcgagccggcgcgggtacgggtgatcgaactgggcgcgctggaattccagcgcgagctggtgatggtcagccgcagcggctcggcgcaggacgacctggtcggtgaattccgccgcgccctgctcgccgagacggcggctcaggaggccgcgccgaccaccgcgtagcgcggcgccgggcgcgccagctcgccgaggaaggtccacaggcgttcggcctcgccgggtagcggcaggcggcgacggatcagggtgtagcgcagcggcacgtcgaagcgctggccgccggcgcgcaccaggcgacggctggcgaggtcctcgcggaccagggtatgcggcagccaggcgacgcccaggcgcgactgggcgaagaagcgcagcccctcggtctggctggagctgtgatggcgctggaggaacaggccgctgtcgcgcagcagcggttccagggcccaacccaggtggcattcctcggagtagccgaggaacgatagcgcttcggtctgcaggcggtcgaggttgaacaacggctggccggcggcgtccggcgcgcagaccgccaccagttgttcgtggccaagctccaggcgctggaactcggcttcgctgtcgatgcccaggcggcgcgacaccgcctcgccttcgtcgagcaacgccaccacgtagtccaccgagccgtcgcgcaggcgcgacaggcattgcggcaggtaatcgcagtcgacgctgaacttggcgctgcggaagtccgcctgcaggcgcggaatccagtgcgggaagaacaccgaggagaggatgtgcggggcgcagaaacgaatgcgccgctgggcgtcttcgtcgcgctcgcggatcgactggcgcaggttgtccagggcgcgcaccgcgtcctgcgccacgccttgcaactggcggccggcctcggtcagttcgagggcgtgcttgtggcgctcgaacaccggcgcgccgagccactgttccagggtctggatacgccggctgagcccggacacggagacatggcactcctgcgccgcacggctgaagctcttgatccgacagaggacgaggaagtccttgagcatcaccaggtcgatcatcgttgcgcgttcctcaacggtcgggcgttttcagtctacttcgcgcggcggtgcctgttgcaaggctaaagttcggtttgttttgccgatttggcaagcagctcgtcgactcccgcaaaacagaccgggaaaaccggcccacagtagtgaggtcgcgcttttccagccatcgacccgcccgagcatcgtggccgggcgggtccgccacgaggacaggaccatgcagacatcccccgctccggccatcgtcgccggcggcgcctaccagccggtggtgctccacgccggcatcgcctacgtcagcggccagttgccgcgccagcacggcgagctgcgctggaccggcaaggtcggcagcgaactcgacctggaacaggcccgccaggccgcccggctctgcgcggcgcgctgcctgcaggcgctggaggaggcgctgggcggcctgcaacgggtcgagcggctgctcaaggtgaccggctacgtcgccagcgcggcgggtttcgtccagcagccggcggtgatcgatgccgccagcgaatatttcgacgaggtgctcggcgcgcgcggcggccacgcccgcgccgccgtcggcgtggccgagctgccgcgcggcgccgcggtggaggtggaactgatcgcggcggtgcggccatgagcgcgctcttccccgccgcccccgacgccttcggtgccgacgaactgctgcgcctgcgccgcgagaccccggcctggggcagctacgcgcacttcgcccatggctccgccagcctgccgccgcaggtgctctacgacgccctcgacagctggctggaagccgagcggcgctggggcgtgcagcgcgccgccgagcatttcgccgagcccttgctggcggtccgcgacagcgtcgcgcgagtgctcggcacccagccacggcacatcgccctgctcgactgcgccagccgcgcctggtcggtggcctttgccgcggccctggccgcccatccacggatacgggcgatcagcagcttcgacgaatacggttccaacagcctgtgcctgctcgccgcgcgccagcagcgcgggctggagctgcgcctgatcgacgcacgcggcgacgccgcacagctgttgcaacggctcgacgagcagttgcacgacctcgcccccggccagacgccgctgctgtcgctcagcgcggtgcccaccgggcatggcgcggctaccgcgctggagggcgtggccgagcgcatccgcgctcatgacgggctgttcttcctcgatgccagccatgcggtcggccagttgccgctggcggtggaggcgatcggctgcgacgtgctggtgttcccgccgcgcaagtggctgcgcgggccgaagggactcggcgtgctctatctcggcgaacgtgccctggagcgcctggccctgcccgacgggctggacgtcggcggcgcgcaatggagcgacgccttcgccctgcaggcacgggatgacgcgcggcgcttcgaatgctcggagttcaacccggggctgcgcctggcgctcaaggccagttgcgactacctgttgcagaccgacgtccggcgcatcgcccggcgtaaccgccagttgcgcgaacgcatcgcccagcagctctaccgccggctcggctggacgccactggagcaagggccgcacgccagcgcgttgatgacctacgcagcccccgaactgagcggcgagcaatggctgaagcgcctccacgcgcgcggcgtgaacgcctcctacatcggcccgcagtatgcccgctgggcgctgcgcgagcaggcgctgccgggggtactgcgcctgactccgcactacctgaccgacgacggcgagatcgagcgcctcggcgaggccctggaggattgcctgcgacagcgcgccgccagttgagcgaccttgcgcgaatggcaacgttgcgccgccgtgccggcggttggcgcaacgccgggcgatttgcgcaaggtctttgtgccggcggcaacgagcgttgccgaatgcgccgcgcacggccgccgccatgcggtttaaatccctctcgtagaacaacgcataacgatcccgccagcgacatctttcacctgcctgagacaccgacgactttcgacgccctgggcagcctttcggtccgccgcggaccgctccgccctcaatggaatgatgaatggaggaaagacgaccatgaccggatcccggaaaaccctgattctcggatgcgcctccaccggcgccaagttcaccccgcgcaaccacgccgccaccggcgaccgcctgctcgacagcatctgcaccggcgccaccatccgcaccgcccctggcgaactgctggacgaagcgcgccaactctacgagatgggttgccgctactaccactatcacgcgcgcaacccgctgacccaggaacagaccaccgacaacgacatctaccaggcggtcagccgcgccctgcagaaccgcttccccgacctgatgttgagcttcggcgccagccgcaacggcagcgaggtgcaggagaacatccgccgcttcggcgagtgggagcgggtcagccactgcgccatcccgctgcacctgggcggtgcgcacttcgtgacgatccaggcggccatcgaattgcaggtgatctgcgagctggagaagcaaaggcgcaagctcgacctcgactatgcctccagcccggccttcctcgccgacctgcgcgactaccagccgtcgacggcgctggaaaaggccgagttgcagacccactccaccagcaagggcgccgactacggggtgacctcgccgatgacccagttccaggtctaccgcaacgccatccaggcgcgccagaagctcggcctgttccacgaggtggagtgggtgcagcatgtgcgcagctacgccatgacccgtttcgccgtggagcacccgcgcctgcgcctgggcggttccggccagttgaacgtgatcctgctgttcggcttctcgccacgcctgccgttcccggagacctaccagcagttccgcgcggtgatcgagagcgccaagagcctggagtacgacatcggcgaacccggcgtgcgcaagcgcaaggtcagcatcacggtcggcgcggcggtgatgccgcagcatgccgcgcagcacttccggccgctcgacgtcggccctcgcgccggcaccccgctctgcgcggtgcgccggctggccgcctatgccgcgcaggcggacagccaggtcgacgtgctgcgggtcggcatggaggacacgccctacgcggtggacgatgacggccaggtgacgctcagcgacaactgccagttgctgcgccaggctctcgacgaactgcgcgccaacggcgccgaggccgagctcgacggcgaacggatcttccagcgcatgggcatggaacgcaccctcggcgaatacctgtcgctgcagcgcctgcatccgctcggcgaagccaacttcaccctcgcacgggagttcgtccagtgaccgccgccctcgccgcgaacccaacccagcgctaccgctgggtcatcctgctgatcgccaccttcgcccaggcctgcgcctgcttcttcgtccagggcatcggcgcgatcgccgtgttcatccagaacgacctgcaactctcgtcgctacagatcggcctgctggtgtcggcggcgcagctggtgccgatcgtcggcctgctggtggccggcgagctgctcgaccgctactccgagcggctggtggtcggcctcggcacgctgatcgtcgcgctggccctctgcgcctcgctgtgggccaccgactacctgaccatcctgctgttcctggtggtcgtcggcgccggctacagcacggcgcagccgggcggcagcaagtcggtgtcacgctggttcgccaagacccagctgggcttcgccatgggcatccgccaggccgggctgccgctgggcggcgcgctgtccgccgcgctgctgccgtacctggcggggatctacggctggcgcagcgcattcctcgccggcggcctggtagcgttcctcggcgcgctggccttcatgctcttctaccgcaccccgccggacgcccccgcgcccggcgcgaaccccgccgaacgcgacctgggcgcggtggtgaagtcgcggctggcgatgatcaccgacccggcgatgaagaacatcgtctgttccggggtggcgctgatctcggtgcagtacggcatcctggtgttcaccgtgctctacctgcacgagaccctggagatcggcatcggcatggccgcgaccctgctgttcgtcgcccagggcagcggcgtcgccgggcgcatcctgctggccgcctggagcgaccgctgccgcgccgggcgctacttcccggtgatggtctgcctcggcgcggtgatcctcggcctgctggcgctggtcctgctgcccctgcaatcaccgttggggatgggcctggtagtggcctggctgggcttcttcggcttcggctggtacggtccctgggtggcctatgtggcggataccgcgccggtcggcaagaccggcttcgccctcggcctggcgatggccatcaaccagttggcgatcgttctcgcgccgccggcgctggggctgctcaaggacttcagccacagcttcgtccccggctggctggcgctctgcctgatggcggcggtagcccttgtggtcaccgcctggagcggccgcggcctgcccaccgcgctgccacagaagcactgaagcgatgacggccacggccgaggaggcacgatgcgcgcgatcctgttcgatgtgttcggtaccctggtggactggcgttccagcctgatcgagcagttccaggcgttggagcgcgaactcggcgggaccctgccctgcgtggaactgaccgaccgctggcgccagcaatacaagccggcgatggaccgggtacgcaacggccaggcgccctggcagcacctcgaccagttgcaccggcagagtctcgaggccctggccggagagttcggcctggcgctggacgaggccctgctgcaacgcatcactggcttctggcaccgcctgcggccgtggccggacacgctcgccgggatgcacgcgctgaaggccgactactggctcgccgcgctgagcaacggcaacaccgcgctgatgctcgacgtcgcgcggcacgccgggctgccctgggacatgctgctgtgcgccgacctgttcggccactacaagcccgacccgcaggtctacctcggcgcctgccgcctgctcgacctgccgccgcaggaggtgatgctctgcgcggcgcacaactacgacctcaaggccgcgcgcgccctcggcctgaagaccgcgttcatcgcccggccgctggaatacggccccggccagtcccaggacctcgccgccgagcaggactgggacctgatcgccagcgacctgctggacctgcaccggcaactggcggcctcggcctgaccgacttcctccttcctgccccctgaaccgctcgcccaacccgcgcgccacggcgcgccgggaaaggcgcgcgcagcgccggcacgcgtccggcaggagcttcgtcatgtccgcgaaggataccccggccccccaggccgccgagcccggtcgcgcccagccggtcgaagtccccggcggcggccactggtggcgccgcctgctggccttcgccggccccggctacctggtcgcggtgggctacatggacccgggcaactgggccaccgacgtcgccggcggcgcgcaactgggctacctgctgctctcggtaatcctgctctccagcctgatggcgatgctgctgcaggcgctgtccgcgcgcctgggcatcgccagcggcctggacctggcccaggcctgccgcgaacgctactcgccgagcacctgccgcctgctgtggctggcctgcgagacggcgatcatcgcctgcgacctggccgaggtgatcggcaccgccatcgccctgaagctgctgttcggcctgccgctggcctggggcgcgttgctctgcgtgggcgacgcgctgctggtgctggtcctgatcggacgtggccagcggccgctggaggccttcgtggtggcgttgctgacactgatcttcgcctgcttcgcggtacagttgctgctctcgcgtcccgaactcggcgaggtgctccaagggttcttgccgagcccgcgggtgctcagcgacccggctgccctgtacctggcgatcggcatcgtcggcgcgaccgtcatgccgcacaacctctacctgcattcctcgctggtgcagagccgcgcctacccgcgcagccttgccggcaagcgccaggcgctgcgctgggcggtggccgacagcagcctggcgctgaccctggcgctgctggtcaacgcggcgatcctgatcgtcgccgccagcgtgttccaccgcaacgggcacaccgaggtggtcgatatcgagcaggcccacgcgctgctctcgccattgctcggcctggaactcgcctcgctgctgttcgccgtggcgctgctcgcgtccggcctcaactcgacggtcaccaccaccctggccgggcagatcgtcatggagggcttcctccgcctgcgcctggcgccctgggcgcggcgcctgctgacccgtggcgtcgcagtgctgccggtactgctggtgaccctgctctacggcgaggatggcaccgcgcggctgctgatcttcagccaggtgatcctgtcgatgcagttgccgctggcagtgatcccgctgctacagttcgtttccgaccggcgcctgatgggcccgctggcgatcggcgccgggacccggtggctggcctgggcggtagcgctggcgatcgtcggcctgaacctgcaactgctggccgacttcgcgttcggctgagcattgcctgagggcacgctgcgcggtgcgggacgcgcactcaggcaatgctcagccatcgagaccgcggggaaaacggtcggccaccaggttcaaggcgatgccatgctccaggcaggccttgagcccggccagcaccagggtgaaaccttcggtggcgtcgaccacccgcgggatgacctcttccggggtgccgacgaaaccgctgttgcggatgctgacgaaggtcccggcgccgggcagttcctcgaacagccactccacctgggaagggttgctgtcgccattcggccattcgatgaggatgcggcggttcgtctgcaggtccttcacttcgatttcctgggaaaccccgtacatgtcccagtgccagcgcagccgtttcccggcttcgaggcgggcatcgccgcggctgaaccagaacctggcggtgatggccggatcgacgaaggcttcgaagacctcggcgatggggcggcggatcagcatttccgccttggcgacgacctgtgcgacggcagtcatggcaagtcctccatgggggtgggcaagggagcggccgccgcatcgggcggccgctcgcggttaatggctcaggccgggtatttctcgttcagagcgtagaggatcgccgccgtctccacatccagcgcgccgtcgtagttctccgggcggaaatgcatctggaaagcgcgcagcaggctggtgaagtaggcatcgtcgaccgtcgccggcagcgcatagccgtacaggcggaacgcctccagcaggtcggcgcgcggcggcaggccgtcgcgctcgaagccttcgcgatagcgatcgcgggtggcgtcgtcgtaccaggcgccgataccggcctcgtagagttccttccagggcagcttcggacccgggtcggacttgcgcccgacggcgatgtcggagtggccgaccacgttcttcggggtcatgtccgggtagcgctgcaggatgttcttcgccagttgcttgagtgcgttgatctgcgagcgctcgtagtcggggaaggtgaacacgccgtcgtcgtcgcgggcgaggttgacgatctcgatgccgatggaggtgtcgttgaggttgtcgcggcgcgcccagccgctgacgccggcgtgccaggcgcggtcttcctcggcgaccaggttgaagatgcgctggcccttgaagccggcggccttgtagctggggtcatgcggcgccgggatcaggtagtgggcgctggcggcgccggtggtcagcgccttgaccgaggcggcgaagtcgagcgcggtgtagtgcagcaccaggaagcgcacgcgtttgccgtagggggtagtggtgcgatagctgttgtagtcgatggtcagcatggttttcacctttttgcggatgatggaaagcccccggccacaggctcgcctgtagctagggacgtcgatgcagcgatgaggttcaggggccggccaaggaaacgcggaccccggctaaaccggaaggaagaagaccgggcataaaaaagcccggcacgcggccgggcaaaagggatacaccaaaggcaagccccagcgaactgggggtgcgggggctcaccgaggccactgaacgatggcgttatgacagcacccggcacaaccgaactttaagctggccggacgccgtgcgggcgcaccccagagcctttcgcaccggtcgccgcccgctgcgtccggttgcgcggcgggcagaaacgacgaagcccggcgctggggccgggcttcgagggcgaccacgggaaacgtgatcatgggaaaaaactaccgcgagcgtcccgccgcgtgcaacaccgttcgtccgttggccgctctactttgcacttcttcacaaagttcaccaatagccatacagaccctcgacagagcggctactactctatccacgccaggtccgattgctcctccatctcctggcattcccggccactgtccccccccgcacagtggctttttttcgcctgcgcctagcgtcgtgccagcggcgcctcgtcccgcgccagcatcagcgccaggatgcagccgaggaggaacgcctgcagcgccaggcgagcggccagcagcgtcggcgggaaggatgggaacaggtcggggtgctgccacatgtagaggttggccggggtcacgcagagggtcaggatgaacagcccgcacgccgccagccggcgccatgccggcaccagcagggcggcggcgccgagcagttcgaagaccccgctgacccacaccgccgccagcggccagggcacgtagggcgggacgatgccgacgaagaaatcggtgaagacgaaatggcccagcccacccagcaggaaccaggcggacacgaaggccacgagcagcgtgcgagcgggcgacggcatggataacctcggcgcggcgatggaacggcaatcctgccacgcgccgccgacgccaggcccataacctttgcccggttggcaggcgtccgccgaaacaaatgctcaaacattcccgccgccggggcgacatctgctcaaaaaatgtcctggcctttcttcgtcgaaagacatagaatccgggactgcgtaccaaactgaaagtcaatcaggctttaccccacgaccgggcccacagatgaaaagggctctaccatcagggttacagccttccgatggttcttcggtcgccactcttctgaagcaatcccctgccacgcagggccgatgggaagaccggcgtcccgcaataccacccgcagattgatcaggatcctggcctggaaactttcttgccaatcgatcctctgattagtacctgaactgccagcttgctcttttcgaaaaaagccggcataaccagtacgttcccccgacacaaagctttcttggcactgtcacggagcgggaacatttgcaatatacgctgctccataagcgtgaaagtaaaggaacataagaatatgtctattcaacatcgtactcaggatgcaattcgcaccctaaccgccgcatttgcgccgttcgactgcctgatccaggcaactcgtaaaggaaacttcagtttcaccatcgttgaccagcatggcgtggcctgccacagcgagcgcctgtatccggagcagtacgacgactccggcaaaatggaagaagtgatcaatcgagttcgcaagaaaacactggctgcctgaatcatgcaagcatcagcgcgaatgcaaggaaaagccccgtccccgacggggcttttttgtgggacagcgaaaagtacaggttaagttgaagaaagttcccacgcaggaaataaatatttacttattcctttttaaatatttcctcgccaacttcgtcatattcccgcggccaggggaaacaagcgcaggccgtttctcccgtactccactcagacgatcgccaggtttcgcttgcgggtaggcggcggaaacgcctggtcgagcgcccgcaggtcatcggcgctcagttccaggtcggccgccactgcattctggcggatgtgagcggacgtcaccgccttcgggatcgcgatcaccccctgctccagtagccaggccagggcgacctgggcgctgctggcgtcgtggcgcgcggcgatctcgccgagcgccgggtgccgtagcagcctgccgccctgccccaccggacagtaggccatcaccggcatgccgcgctcctggcaccagggcagcaggtcgtattcgataccgcgttcctccaggttgtacatcacctggttggcggcacaggcgctgccgtccagttcgtacatgtcgcccaggtcgaagttggacacgccccagcgcaggatcttgccctggtcgcgcaaccgctcgaaggcttcgatggtttcctccagcggataccggccctgccagtgcagcaggtagaggtcgatggtttcgcaaccgagccggcgcaggctgcgctcgcaggccgccggcagacccttgcggctggcgttgtgcgggtagaccttgctgaccaggaagacctcttcgcggcgtcccgcgatagccgcgccgaccacgtcttcggcgccgccctcggcgtacatctcggcggtatcgatcagcgtcatccccagctcgatgccttcgcgcagcgccgcgacctcgcgcttgcgttctccgggctgctcgccgatatgccaggtaccctggccgatggcggcgacctcctggccatcgatcagcgtgagcgttttcatgcagcgtctcctgtggtgaatggacggggcctcatgcccagggatcatagctgccgaagctccagacgtggccctccggatcgcggcaagtgaagccgcgaccgccgtagtcctcgtccttgatgtcgatgacgatctcggcgccggcggcctgggcgctgcggaacagggcgtcgggatcggcgaccaccaggtagaggctctgggtattgccgccggcttcgtcgacgtgccgcatcagccgaccgtaggcgttgtcgcggacgctcgagccgagcatcagcatgccgttggcgccgttcgggctggcgtaggtcaactcggcgtggagcacctgtccgtcctcgccgggcaccaccagcttgcgctggaagccaaaggtccggcacagccagtcgatggcggccggcgcatcgcggtaacgcaggcagggaatgacgctggcgacggtgttgctggcgggcgtgtgcatggcgcatacctccgggggaaagcacgaccaccagcatagacgctggaccggaccgcccccgaggcacggatgggcggcgcgcccttcagcgcagcagcgccagcaccccgccgagcaacggcactccggcggcgcaaggcaatgcccagcgtggccgccaggcgagcagcaggaccagcgtgccggccgccagcatcagcaggcaggaccagaagacgatgccgatctccacgccctgccggtggatcgagaaggccagcgccaggcccaggtcgagcagcgccacgccgcgtagcagaagcacccgggaagccgacggctcgtggccgagaaggttcttgtggtggcggttcatggccaggcagagagcggtgaaggccagcaggttgaggccgaagaccagcagcatcaggccacctcctggacgttcaggcgtcgccggacgggcttgctcgacgcttgccgacgtcgccaacctagccaggcgcagagcaggccgaggcccagcaggctgaggtcgacgccggccagcacccagtcgccgcgctgcaggctggccaacaggttgccttccgggctacgcagcaggccgagcagcggcaggcccagcgccagcacggcggcgaggcgcagttgcgtgcgaccgagggtcccgctgttgcggcggacgatggcccacagcgcgaccagcgcccaactggcgcaaaacacgcggatctcccaggtgtcgcggccggccagttgcgtcggcagcaggcggttgccccacagcagcgccaggctggccagcggcaggccgccgcagaccgccaggttcagcgcccgcaccagaccaacgccacgactgccgcggacctcgcgcttggccagccagacctgcaacccgccgaagatcatcatcgccccggacagcccgagcaacaggtacatccagcgcaccaactggccgccccactggatcatgtgcaggccggtcagccagccgtaggtggcgtagccgggcgcataggacggctgggcatgcagcagttcgccgctggaggcatcgaagttgaccgtgcgctggtcgtcgaggatgcgcgaggcgtcgcgccggcggatgtccacggtggccgcctcgtcatagggatggtggacgctgatccagcccggcgcgccgccgtcgccccagaccttgccggcctcgacgatcaggccgtcgatggacgccggcggccccgccgggcggccgacttcctcgcgttcgtaggagccctgcacttcatggaagaagcgctcgccatcgttctggtagaccacctgcaggcccgcctgcatgtagtagacgatgaagatcaccaggccggtgtaggcgatcatcaggtggaacggcaggccgatcacccccagcacgttgtgcgcgtcgagccaggcgcgctgccgcgccgcctgcgggcgcagggtgaagaagtccttgaagatccgccggtgcacgatggtcccgctgaccagcgccaccagcatcagcatcccggcgatgccgacgatgtacaggccgaccatgccggcgtgcaggtcgtagtgcagggtgaagaagaactcgccgccgactgtcttcggcagcggctggccgctcaccgcgtccagctggaagaccttgaactcgctgccgtcgcgcggctcccagccggcgttccagtagggcgcccgctcgctcggcggcagcatccaccaggcatgggcatcgggggcgcgctggcgcaaccagtcgcgcacctggtcggcgcccagcgactgcgcgccgggcaggtgcaggtccggctgcatccagcgggtcagctccttgtcgaagctggccaggctgccggcgaagacgatgacgaacagcagccagctgaccagcagccccgaccaggtatgcaggccggacatcgattgacgcaggttcatggacgcgctccgtagtcgaggccgagccaggccaggccgcccagcgccaggctggccagcgccagcacccagcaggcgcgccaggcgctgcgcgcggcgaaggcgtagacgatggccgcgacccacacggcgaagcagccgaggctgccgaacgagacccggtcgggacgcggcagcggcaggtagatgctcaggcaggcggtgaccgcataggccagcgcgtagccaagcaggaccgcgacgaggatgcggccggtgacggacagtccgccggccagggcctggctggtcatggggcggcgtcccgggtggaaactgggccttgcatcgtcgctacctcgtctggctggcacggcgacgccgcgctcgcgggtggcgaggcagtcgtcgactcggaaggtttgcgactgtatctcaattacgttcgcatttgtacttgctccggacgaccgccaggtcgcgtcgcgccagggattgccggggtccgacgagcgcgggtcgcatcccgccgcattcgttcgccgcgccatacgtccatctccgctctgcgcaagcgtgccgagcttggtaatatcggctgtttgcggtttcggctggtttcgccgaaggacataccggatgacttcaccctccgccccagacacccagctcagcctggccatcgacccggcccggccgtatgcgcggctgaccctcggcagccacgtgcacagcggctacgacctgcgcagcggacgcatgcagagcatttcccggcaccgtgcggcgctggccttcatctatgccggcgaggcggtttccgggcgtcccggcagcgagccacgggaggcccagcggcgtatcgaacggcgtccggcgcacgagcaggaataccgcgagaccctgcgccgcctcggcttcaagccggcgacccggcgcagcgacgcgctcgaggagagcgccggcgagatgttcgaactgcccggcgacaacgcctggctgcacttcatgcaggacgacctgccgcgcctgcgccagcaaggctggttcatcgacatccgcgccgacttcgcctacgacctgacgcccatcgacgcctggtacgccgaggtcgaggaagccgacgaccgccagtggttcgagctggaactgggcatccaggtcgccggccagcgggtcagcctgctgccggcgctgaccgaactgatccgccgcagcccggccctgctcgatccgcgcgccctcgcccggcacgccgacgaagagcaactggtgctgcgcctggaactcaacccgccgctgcgcgtggcgctgcccttcggccgcctgaagccggtgctggcggcgctttccgacttctacctgggcgaccccgaaccgcagcgcaagctgcgcctgggcgcaccggacgcggcgcgcctggccgatctcgacgagttgccgctggcctgggaaggcggcgacaacctgcgcgacttcgcccgccgcctacgcagtttccaggctcgtccggcgaccccgccacaaggcctgcgcgccgaactgcggccctaccagctcgaaggcctgagctggatgcagaccctgcgcgaactcgacagcggcggcgtgctggccgacgacatggggctgggcaagaccttgcagtcgctggcccacgtgctcctggaaaagcaggccgggcggctcgacacgccggcgctggtggtgatgcccaccagcctgatccccaactggctggacgaggccgagcgcttcgcccccgatctgcgcgtgctggccctgcacggcgccggccggcgccgcgacttcgcccgcatcgacgagcacgacctggtgctgaccacctatgccctgctgccacgcgacgccgccgagctgggcaagcggcggttccacctgctgatcctcgacgaggcgcagaacatcaagaacgccaccaccaaggccgccgtcgccgcccgcgagctggcggcacggcatcgcctgtgcctgaccggcacgccgctggagaaccacctcggcgaactctggtcgctgttccatttcctgatgcccggctggctcggcgacgcccgccagttcgcccaggactaccgcacgccgatcgagaagcacggcgacgaggcacgcctcagtcacctggccgcgcgcctgcggccgttcctgctgcgacggaccaaggaacaggtggcctcggaactgccgccgaagagcgagttcacccagttcgtcgaactcagcgaggcgcaacgcgaactctacgagaccgtgcgcctggcgctggaccgcaaggtccgcgaggagatcgcccggcgcggcctggcgcgcagccgcatcgtgatcctcgaggcgctgctcaagctgcgccaggtctgctgcgacacgcgcctgctgcaacgccaggaagacggcacgcgcagcggccgggcgctcagctcgggcaagctggcctacctgctcgacatgctcgacgaactgatcgccgagggtcgccgggtcctgctgttctcgcagttcacctcgatgctcgcgctgatcgaggacgccctgcgccagcgcggcgtcgactacgtcctgctgaccggcgagacccgcgaccgccgcgccccggtacagcgcttccagagcggcaaggtgccggtgttcctgatcagcttgaaggcaggcggggtcggtctcaacctgaccgcggcggacaccgtgatccactacgatccctggtggaacccggcggtggagaaccaggccagcgaccgcgcctaccgcatcggccaggacaagccggtgttcgtctaccggctgatcgcccgcggcacggtggaagagaagatccagcacctgcagcaggaaaaggccgccctcgccgacggcctgttcagcgaaggcaacggcgacggctggaagctcgacgaggccgatatcgacgcgctgttcgcgcccttgcccaaggcgctctgagcgccgcccggattcagcgcgcgacgccgcggtagacgtaggtcatcggccgcggcccgggcaggtaaccctgttccagctcgtcgatgcgaaagccggcctcgcgcagcaaggccggcatgtcgcggtccaggtggcaaccgccggccagcggtttccaccagggcgtcaggcgccgttgccaggccagcaccgaggcgtccggcgcgcgcccatgctcgcagaacagcaattcgccgccacgcttcagcacccgacgcatctcgcccagcgccggcagcggcgcggcgatggagcaaagggtgaaagtgcagacgatggtgtcgaagctttccgcctcggcgcggatctcgccaagctcgagggcgaccatttccaccgggatgccgatttgcgccgcgcgctcgcgggccagcgcctgcatttgcgcggccgggtcgacgccgacgatcgccgacaccttcgccgcgtcgtagaagcccaggttgagcccggtgcccagaccgatctccagcacccgcccatgggcgcgcggcaccagcagcgaacgctgcttcatcacgtcgcccatgccgcaggcgaagtcgatcaggcgcggcaacacgtaacggtcatagatgcccacgaaactctctcctggcacagcggctggaggggaaagcatagaccagcgatgcattagacgattgtcgacaatcaagcgacgaatgattgaccccacgcaatccaggcggtagctttcgcaaacattgtcgacacatcgacccggacagccagtaccatgacccagaacccaccccctctcgagattgcccatgacgacggcgagaccttgtcggaacacgtcttccgcaagatccagagcgccatcgtcagcggcgagatcgcgccgggcagcaagatctccgagccggagctggcgcgcacctacggcatcagccgcggcccgctgcgcgaggcgatccaccgcctggaaggcctgcgcctgctggtgcgggtgccgcatgtcggggcgcgggtggtgtcgctgagccacgccgagctgatcgagctctacgagatccgcgagtccctggaaggcatggcctgccgactggccgccgagcgcatgagccaggccgagatcgacgagttgcgccgggtgctcgatacccacgagcgcgacgaggcgttccaggccgggcgcggctattaccagcaggaaggcgactacgacttccactaccggatcatccagggcagcggcaacgccactctcacccgcatgctctgcggcgagctctaccaactggtgcggatgtaccgcatccagtactcgaccacgccgaaccggccgcgccaggccttcgccgaacaccaccgcattctcgacgccatcgccgaccgtgacggcgaactggccgagctgctgatgcgccgccacatcagtgcgtcgcgccgcaatatcgagcgccagctggaaccccagccggcgaagctcgcctccgcttcctccaccgtctaagaggtccgtgatgagccagacgtcccttacccccggccagcgcttccgcgaagccgtggccaccgaacacccgctgcaggtggtcggcaccatcaacgccaaccacgccctgctggccaagcgcgccggcttcaaggccatctacctgtccggcggcggtgtcgccgccggttccctgggcctgccggacctgggtatcagcggcctcgacgacgtgctcaccgacgtgcgccggatcaccgacgtctgcgacctgccgctgctggtggacgtcgacaccggcttcggctcctcggcgttcaacgtcgcccgcacggtgaagtcgatgatcaagttcggcgccgccgcgatgcatatcgaggaccaggtcggcgccaagcgctgcggccataggccgaacaaggagatcgtctcgcagcaggagatggtcgaccgcatcaaggccgccgtcgatgcccgcagcgacgactccttcgtgatcatggcgcgcaccgacgcgctggccgtggaaggcctacaggccgccatcgaccgcgcctgcgcctgtgtcgaggccggtgccgacatgatcttcccggaagccatgaccgaactggccatgtacaaggaattcgccgccgcggtgaaggtgccggtgctggccaacatcaccgagttcggcgccaccccgctgttcaccaccgacgaactggcctccgccgacgtgtccctggtgctctacccgctgtcggccttccgcgccatgaacaaggcggcggagaacgtctacaccgcgatccgtcgcgacggcacccagaagaatgtgatcgataccatgcagacccgcatggagctgtacgatcgcatcgattaccacagcttcgagcagaagctcgacgcgctcttcgcgcagaagaagaacgcctgaacatcgagcccggcgtgcgcctgagcgccggtccgcgaaccccgtgaaaccgagttgcagcatccagaaaaagttcaagaaaggagagagcaatggctgaagcaaaagtactgagtggcgccggcctgcgtggccaggtggccggtcagacagccctgtccaccgtcggccaggaaggcgccggcctgacctaccgtggctacgacgtccgcgacctggcggcggcggcgatcttcgaggaagtcgcctacctgctgctctacggcgaactgccgaacaagcaacagctcgacgcctacctgaagaagctccagggccagcgcgacctgccgcaggcgctgaaggaagttctcgaacggattcccaaggacgcccacccgatggacgtgatgcgcactggcgcctcggtcctcggcaccctggaaccggagctgagcttcgaccagcagcgcgacgtcgccgaccgcctgctcgccgccttcccggcgatcatgacctactggtaccgcttcacccacgaaggccagcgcatcgactgcaacagcgacgagccgaccatcggcgggcacttcctcgccctgctccacggcaagaagcccagcgagctgcacgtgaaggtgatgaacgtctcgctgatcctctacgccgagcatgagttcaacgcatccaccttcaccgcgcgggtttgcgcctcgaccctgtccgacctctactcctgcgtcaccggcgccatcggctcgctgcgcggcccgctgcacggcggcgccaacgaggcggcgatggaactgatcgaacgcttctcttcgccgcaggaagccaccgccgagctgctgaagatgctcgagcgcaaggacaagatcatgggcttcgggcatgccatctacaaggattccgacccacgcaacgaagtgatcaagggttggtcgaagcagctcgccgacgaggtcggcgacaaggtcctgttcgcggtttccgaggccatcgacaagaccatgtgggagcagaagaagctgttccccaacgccgacttctaccacgcctcggcgtatcacttcatgggcatcccgaccaagctgttcacgccgatcttcgtctgctcgcggaccagcggctggaccgcccacgtcttcgaacagcgcgccaacaaccgcatcatccgcccgagcgccgagtacaccggcgtcgagcagcgcgcgttcgtgccgctggagcaacgctgatccacgccgtccggcgcgccgaacgcgagcgcgccggacggttgccgcacccagaattcgaaaggccggcgtgggctgcgccacggcgcgagcgacacgcttccgaacaccccgtgattgagtccgagccatgaacagcgcacaccgcaaaccgctccccggcacccgcctggactacttcgacgcccgcgaggcggtcgaggcgatccagcccggtgcctacgccaagctgccctatacctcccgcgtgctcgccgagaacctggtgcgccgctgcgacccggcgaccctggaggcttcgctgcgccaactggtcgagcgcaagcgcgacctcgacttcccctggtacccggcgcgggtggtctgccatgacatcctcgggcagaccgctctggtcgacctcgccggcctgcgcgacgccatcgccgacaagggcggcgacccggcccaggtcaacccggtggtgccggtgcaactgatcgtcgaccactcgctggcggtggaatgcggcggctacgaccccgaggccttcgccaagaaccgcgccatcgaggaccgccgcaacgaggaccgcttccacttcatcgactggaccaagcaggccttccgcaacgtcgacgtgatcccgccgggcaacggcatcatgcaccagatcaacctggagaaaatgtcgccggtgatccaggcgcgcgacggcgtggccttccccgatacctgcgtgggcaccgacagccataccccgcacgtcgacgccctgggcgtgatcgccatcggcgtcggcggcctggaagcggaaaacgtgatgctcggccgcgcctcctggatgcgcctgccggacatcgtcggcgtcgagctgagcggccgtcgccagccgagcatcaccgccaccgacgtggtgctggccctgaccgagttcctgcgcaagcagaaggtggtcggcgcctacctggagttctacggcgaaggcgcctccagcctgaccctcggcgaccgcgcgaccatctccaacatggctccggaatacggcgccaccgcggcgatgttcgccatcgaccagcagaccatcgactacctgcgcctcaccggccgcgacgacgagcaggtcgccctggtggaggcctatgcgcgcaccgccggactctgggccgacagcctggtcgacgccgagtacgagcgggtactgaagttcgacctgtccagcgtggtgcgcaacatggccggcccgtccaatccgcacgccagggtcgccaccagcgaactggcggcgaaaggcatcgccggcaacctcgagcgggcccgcgccgaggaagccgagggcctgatgccggacggcgcggtgatcatcgccgcgatcaccagttgcaccaacaccagcaacccgcgcaacgtgatcgccgccggcctgctggcgcgcaacgccgaccgcctcggcctggtccgcaagccatgggtgaagacctcgctggcacccggctccaaggtggtcaccgaatacctgcgcgaagccggcctgctgccgcacctggaagccctcggcttcggcgtggtggcctacgcctgcacgtcttgcaacggcatgtccggcgccctcgacccggcgatccagcaggagatcgtcgagcgcgacctgtacgccaccgcggtgctctccggcaaccgcaacttcgacgggcgcatccacccctacgccaagcaggccttcctcgcctcgccgccgctggtggtggcctacgccatcgccgggaccatccgcttcgacatcgagcgcgacgtgctcggcgtggtggacggcaaggagatccgcctgaaggacctctggccgagcgacgaggagatcgacgcggtggtcagggcggcggtgaagcccgagcagttccgccaggtctacatcccgatgttcgacatcacccacggcgagcgcgagaaggtcgacccgctctacgcctggcgcccgacgagcacttacatccgccgcccgccgtactgggaaggcgccctcgccggcgaacgcaccctgcgcggcatgcgcccgctggcggtgctgccggacaacatcaccaccgaccacctgtcgccgtccaacgcgatcctcgccgacagcgcggcgggcgaatacctggcgaaaatgggcctgcccgaggaggacttcaactcctacgccacccaccgcggcgaccacctcaccgcacaacgcgcgaccttcgccaacccgaagctgttcaacgagatggtgcgcaacgccgacggcagcgtgaagcagggttcgctggcgcgggtcgagccggaaggcaaggtgatgcgcatgtgggaagccatcgagacctacatggagcgcaagcagccgctgatcatcgtcgccggcgccgactacgggcagggttcttcgcgcgactgggcagccaagggcgtgcgcctggccggggtggaggcgatcgtcgccgagggcttcgagcgcatccaccgcaccaacctgatcggcatgggcgtgctgccgctggagttcaagccgggtaccacccgcctgaccctggggatcgacggcagcgagaccttcgacgtgctcggcgctcgccggccgcgcgccgacctgaccctggtcatccaccggcgcgacggggagcggctcgaagtgccggtgacctgccgcctggacagcgacgaggaagtctccatctacgaagccggcggcgtactgcaacgcttcgcccaggacttcctggaggcggccggcgcctgatggcgccggcgaaacaccctggtaggacggacgacgcgtagcgtcatccgccgacgaccggcagcggctgtcgaacgcagccgctgcccctgaattcgattgccgaggacgacgacgcatggcccacccaccccagatccgcatccccgccacctacctgcgcggcggcaccagcaagggcgtgttcttccgcctggaagacctgccggaatcctgccgggtccccggcgaggcgcgcgatcggctgttcatgcgggtgatcggcagccccgacccctatgccgcgcacatcgacgggatgggcggcgccacctccagcaccagcaagtgcgtgatcctctcgaagagcagccagccgggccatgacgtcgactacctctacggccaggtctccatcgacaagcccttcgtcgactggagcggcaactgcggcaacctctccaccggggccggcgccttcgccctgcacgccgggctggtggatccggcgcggataccggaagacggcatctgcgaggtgcgcatctggcaggccaatatcggcaagaccatcatcgcccacgtgccggtgagcggcggccaagtccaggaaaccggcgacttcgagctggacggagtgaccttcccggcggccgagatcgtgctggagttcctcgacccgtccgacgacggcgaggacggcggcgccatgttccccaccggcaacctggtggacgatctggaggtgccgggggtcggtaccttcaaggcgaccatgatcaacgccgggattcccacggtgttcgtcaatgccgaggagatcggctaccgcggcaccgagctgcgcgaagagatcaacggcgacccgcagcaactggcgcgcttcgaacggatccgcgtcgccggcgccctgcgcatgggcctgatcaagacccccgaggaagccgcgacccgccagcacacgccgaagatcgccttcgtcgccccgccccgcgactaccgcaccgccagcggcaagctggtggcggccggcgatatcgacctgctggtccgcgcgctgtccatgggcaagctgcaccacgcgatgatgggtaccgcggcggtggccatcggcaccgccgcagccattcccggcaccctggtgaacctcgccgccggcggcggcgaacgcagcgcggtacgcttcggccatccctccggcaccctgcgagtgggcgccgaggccagccaggcgaacggcgaatggacggtgaccaaggcgatcatgagccgcagcgcgcgaatcctcatggaaggctgggtgcgcgtacccggcgacgccttctgaaccgacctatccttgccccggccttccgccaccgcgaaaggccggggcgtcttgccgccacgacaagaaaaaccatccccgaaccagcctgacccgagaggaaacccaccacttacgaaccactggagtacgcgatgagtgccaacgtcgatctcaaccaacgtcccgactacgacgccgtcctgcaggacatcgccgactacgtgctggactaccgcatcgattccacggaggccctggacaccgcccgcaactgcctgatggataccctcggctgcggcctgctggcgctgcgcttcccggaatgcaccaagcacctcggcccgctggtcgagggcaccctggtcccgcacggcgcgcgggtgccgggcacctccttccggctcgacccggtcaaggccgcctgggacatcggctgcatcgtccgctggctggactacaacgacacctggctggccgccgagtggggccatccctcggacaacctcggcggcatcctcgccgtcgccgaccacctctcgcagaaacgcctggccaacggcgaagcgccgctgagcatgcgccaggtactggaagcgatgatcatggcccacgagatccagggcgtgatcgccctggagaactcgttcaatcgcgtcggcctcgaccatgtgctgctggtcaaggtcgcgtccaccgccgtctgcgccaagctgatgggggccgaccgcgagcaactgctggccgccctctcccacgccttcgtcgacggccaggccctgcgcacctaccgtcacgcaccgaacgccggctcgcgcaagtcctgggccgctggcgacgcgacgagccgcggcgtgcgcctggcggacatcgccttgcgcggcgagatgggcatccccggcgtgctcagcgcgccgcaatggggtttctacgatgtcctgttcagccacaccagcaaggacctggcgaccaagcccgaggacaagcggcgcttcagcttcccccagggctacggcagctacgtgatggaaaacgtgctgttcaagatcagcttccccgccgaattccacgcgcagaccgccgccgaggccgccgtgcgcctgcatccgctggtgaaggaccgcctgcaacggatcagccgcatcgtcatcaccacccacgagtcggcgatccgcatcatttccaaggtcggcccgctggccaaccccgccgaccgcgaccattgcctgcagtacatgaccgccgtgccgctgatcttcggcgacctggtggccgagcactacgaggactccttccacgccgcccacccgctgatcgaccgcttgcgcgagaaaatggagatcgtcgaggagccgcgctacagccgtgaatacctggaggcggacaagcgctccatcgccaacgccgtggaagtattcttcgacgacggcagcagcaccggccaggtcgccgtggagtacccgctcggccatcgccgccggcgcgccgaaggcatcccgctgctgcaggagaagttcaaggccaacctggccacgcgcttcccgccgcagcgctgccagaggatcttcgacctgtgcagccaccaggcatcgctggaagccacgccggtgaaccgcttcatggacctcctggcgatctgagcgcgcccgcctggaaggcgctgggcggctggccgaggacccggcggaacatggtcgagaaggctgccgggctctggtagccgcagtctagggcgatggcggtgaccgtttcgccgccggccagccgcgccagtgcctgcaccacgcaggcgcgttgcttccaggcaccgaagctgaggccggtgtagcgacggaaggtgcggttgaaactgcgcaggctggtatgcagcaacccggcccagcgttcggcgctggcgcggatgtcgggctcgacgaggaacgcctcgcagagcgccagccagcgcggctcgggcggcaagggcacgtgcagcggcagcgtctcggccgccgccagctcatggagcaacagcgtcgccaacgcgccgtcgcgaccttcggtgtcgtattccaggggcatgtccaccgccgccagcaacagttgccgcagcagcggcgacaccgccagcacctggcagtgcgccggcatcgccatggcgctgccgggctcgatgtacaggctgcgggtgctcaccccgagcattcgcacctcgtgctcgacgcccggcggaatccacactgcgcgctgtggcggcaccacccagccggcgtcgccggtacgcacctgcatcaccccgctggcaccgtacagcaattgcgcgcgacgatgccgatggcgcggcagcaggtagccgtcgggatagtcggtacccatggccaccacggcccggggcgtggcgtcgtactgctcgatggaagcgttgcgcatggtcgaagcacttggccgaaacgcgaatagtattggccaacctcgcgaagcgggccagccccgggacgcctaagctggccttccgctctcgctccggaaacccgccatgttctatctcctgctctttctctgcggctgcctcaccggggtcagcgccgtgttgttcggctttggcggcggcttcgtggtggtgccgctgctctatcacctgctgcaactcggtcgcgccgccgacgacccgctggcccaggcggccatgcaggtcgcggtggccacctcgacctgcgtgatgatcgtcaacgccgccctcgccacctatcgccaccggcgcgccggcagcctgctgcgcgcctatgtctggccgctgggcgcgtacatcggtatcggcgcggtgcttggcgcggcgctggtcggcctggccagcggcgacttcattcgcctggccttcgtcgcctacctcgccatcaccatcctcgactgcctgttgcgtcgcggcttcctcagccgcgccgaggagcgccaggcgcggccgctgggcgtcggcgagacgcgcctgggcggaacgctgatcggtgcgatcgccaccttcctcggcgtcggaggcagcgtgatgaccgtaccactgctgcgccgctgcgggctgagcatgacccaggcgacctccatggccaacccgctgagcctgccggtggctcttggcggcacccttacctacctggtcctggccggctaccaggagcaaggcctgggccgaggcttcgtcggctacatcgacctgctggccttcgccaccctggccggcggcggctggctcggcatccgcctggcgaccccgctgatcgggcggattcccgatgcgctgcatgcacgggtgtacgtcggcctgctggcggcggtgatgctgagcatgctggcgggctgatgccccagcctgggtagggcgaataacgccaacggcgttatccgccggatgcaccggaccggatatcggcgcaacgaaaaaagggcctcgtccgaggccccttttcttttccggcgctacaccgctcaggacgccgcgcggcttaccgagccggtgccggaaggctccttcggcgccaggttgaaggcgtagtacaggacggtcagcagcaggatgaacggcgggccgatgtagagggcgatgcgggtgtcctcgaagaaggccatcagcaccaccaccatcaccaggaacgccagcgccaggtaggaactgaccgggtacagccacatgcggtattgcagcttgtcgcactcggccgggctgagcgtcttgcggaagcgcaactgggccagcaggatcatcgcccaggtccagatcgcgccgaaggtggcgatggaagtcacccagacgaataccttctccggcaccaggtagttcagcaacacgcccagcagcagcgccaggatcgacaggatcagcgcccggcgcggtacgccgctgcgcgaggccttgccgaagaaggccggggcctggcgatgctgggccaggctgtagagcatgcgcccggtactgaagatgccgccattgcaggacgacagtgcggcggtgatcaccacgaagttgatgatcccggcggcggtcttgatgcccatgcgctcgaaggtcatcacgaaggggctgccctgggtgccgatctcgttccacggatagagcgacatgatcacgaacagcgagccgacatagaacagcaggatgcgccagaacaccgagttgatcgcgctgggaatggtcttggtcgggttacgcgcttcgccggcggtgaggccgatcatttccaccccgaggtaggcgaacatcaccatctgcagcgacatcagcacgccctggatgccattgggcatgaagccgccgtgggcccagaggttggagatgccggtggcgatgccgtcgttgccgaagccgaaggcgatcatgccgatgccgaccaccaccatcgccaggatggtgacgatcttgatcagggcgaaccagaactcgaactcgccgaaggcacgcaccgcgatgaggttgatcgtgcccatgctcgccagggccgccagggcccagatccagcgcggcacgtcggggaaccagatacccatgtagacggcgacggcggtgatttcggcgacacaggtcaccagccagaggaaccagtagttccagccggtgatgaagcccgccagcgggcccaggtagtccttggcgtactggctgaaggaaccggccaccggattgtgtaccgccatctcgccgagggcgcgcatgatcaccaggatcgccaggccgccgaggatgtaggagatcatgatggccgggccggccatctggatggccttcgccgagcccaggaacaggccgacgccgatacaggcgccgagcgccatcaggcggatgtgtcgctcaccgagctcgcgcttcagggagccgtcttgaaccttctgttcgccgacagacgacatgggaacaacctcattttgttattgagatagatcagttgcggactcgctcgtgcggtcggggtagggaagcggatttcaccaacggcgcggcccctgcgcgataccgcacagcgggcgacgacggggcgtcataggttccaggactgcacaccggaagaggctgtccgctctcgtggagcggacgtgggcattgcgggagtcgactacaactgaggtcgggccggagttttacacaagatttcaaggccgtcatgccccgcgatggggcaactggaccaaaggcgtaaggaccgccaacgctgaatggattcactccctgggccgcgcgcgcagcagcagggacagcggccggccgagccgggagtggacggtttcgcgctggccttgcaggcgccagctgcgctcgagcagccggctgcgctgcatggggtcagcgcaggggttcgcggcagcggagatcgcggtaggggccgtcgagcctgacccagccgtctcccggcgaggtctgcatgcaggcgacctgaccgtcgagcttgctctgccatttgtagaagggcgccggcgcggcctgcgccgcgaggccggagaaacccgccaggacgacaccgacgagaagggggaaaagtgtgcgcatcgacattccggacccgaaacacaaggaactcagacagacactctaacccctgcgccacgccgctccaatcctcggtcgtccgattgccgccggggagattttccttgcacgaatgacagcagggttgcagcgggacaactagacttccccccaggtgcggatgaattgcgcagctacaggcggtgcgagcatgggtgcatcagaacgatccacgaacgacccttccgagctgcaaccctgcagtctccctgcctccgcttctcctcgaaaaagccgtctccgccaacgcctgatgctgatcggcttcgccttgccgatcctcgccgcggtgggcatcgtggtacttcacgaagcgcacacctcgcggctgcaggcacgcgagctggcacgctatgccgcgaccctggactacgaggtgcgccagggtcccagcgaggccatcctgttcccggcggacggccccttcgaccgccgcctcggctaccagttgctgccttcgttcatgcagcgcctgtacgaccgcgactacgccatcacccgccaggcgcacttctccccggtactgatgcgctacgccgaacaccggctgttcccgccctacgcggaaaaggcccaggccgggctggacatcgccgattgccgcggcgtgccgatctacgacttccgctatccgcaacggcgctacgcgaacttcgccagcctgccgccgctggtggtgcagagcctgctgttcatcgagaaccgcgacctgctcgatcacgaacgcccctacctcaacccggcggtggactggggtcgcttcacccaggcggcgctgtcgcaggtcggcaagatgctcggcttcagcgcgcactcctccggcggcagcaccctggcgacccagatcgagaaataccgccactctgccgaagggcgcaccggcagcatcggcgacaagctgcggcagatgctctcggccagcgtacgcagctatcgcgaaggcccggccaacttcgccgcgcgccaggacatcgtgctcacctacctcaactcggtgccgctgtcggcggcgccgggctacggcgaggtcaccggcctggccgatggcctgtgggtctggtacggcgccgactaccggcaggtcggcgaggcactcgacggcaaggccggactcgccgcccagggcctggccctgcgccaggtgctggcgctgatgatcgcccaccgccggccttccttctatctggcgccgcgcggccgcgacgagctggaccggatgaccgacagccacctgcgggtcctgacccaggccggcgtcatcgaggcgccgttacgcgatgcggcgctggcgcagaagctggcgttccgcgacccacgcagccagccgacggtgcaaccgctgccgaccaacaagggcgtgaccctggctcgcacccgcctggccgggatgctcggcgtgccactgtacgacctcgaccgtctcgacctgcgggccaataccaccctccagcacgagttgcaggaaagcgtcaccgcctacttgcagaaactcgccgacccggactacgccgcccagctcgggctgatcggcgaacgcctgctgaccccgacctcgacccgctcggtacgctacagcttcaccctgttcgaacgtacgccgagcggcaaccaggtgcgggtgcagaccgacaacaccgaccagcccttcgacatcaacgaaggcagcaagctggagttgggctccaccgccaagctacgggtgctggccagctacctggagaccgtcgcgcagatccaccgcgactatggcggcatgagcgtcgccgagctgcgcaaggtggaagtggagccgctcgatttcatcctccgctggggcatcgactacctggtcgccagccgcgaccgcgatctttccgcgatgctccaggcggccatggaacggcgctattcggccagcccctacgagagcttcttcaccggcggcgggctgcacaccttcaacaacttccgcaaggaagacaacggccgccggccgatgctgctggaagccctgcgcgaatcgatcaacctgcccttcgtgcgcctgctgcgcgacctgatccgccacgacatctaccagaacgccgggagcaaggtgcagttgctggccgacgacaaggacccgcgccgcgccgactacctcgaccgtttcgtcgacaaggaaagccaggtctacctgcgccgcttctgggtcaagtaccgcgacaaggacgccaaccagcgcctggagaccttcctcgacggcctgcgtccctggccggtgcggctggccgcgatccaccgctacctgcagccacaggccgacctggcgagcttcagcgccttcctccgcgaacgcctgccccgcggcagcctgaccgacaagcgcgccgccgagctgtacgagcgctacggcccgggcaagttcaacctcaacgaccagggctacgtcgcccgcgtgcacccgctggagctatggctgctcggctatctgcagaagcagccgcaggcgaccttcggcgaggcggtggcggccagcggcgccgagcgcaaggaggtctacggctggctgttcaagtcgcggcacaagaacgcccgcgacaagcgcatccgcatcctgctggaggtggaggccttcctcgacctgcaccagcaatggaagaaactcggctatcccttcgatcacctggtgccctcctacgccaccgccctgggcagctccggcgaccgcccggcggcgctggccgaactgatggggatcatcgtcaacgatggcgtgcgcatgccgaccctgcgcctggagcacctcgacttcgccctgggtacgccctacgagacgcgcttcgccccggaagccaccctcggccagcgggtgatgacctcggaggtcgccacgaccctgcgcaacgcgctgtcccaggtggtcgacgccggcaccgcgcggcgcctgcaaggcaccttcagccgtccggacggcgcgccactggtgatgggcggcaagaccggcaccggcgacaaccgcctgcagaccttcagcgccggcggccacgtgcgcagttcgaaggcactgaaccgcaccgccactttcgtcttctacatcggcccgcggcacttcggtaccctcaccgcctacgtcgacggcagcgagtcgagccagttcaagttcacctcggccctgccagtgcaggtactcaagggcatggcaccgctcctcagggactacctcgacccacgcaccgccacccgctgccaggtaccgttgtcgccgcaacagatcggccgcctgtagcggttcagcgcaccggccagtaccaggccggccggtccagctcgcgcagcccctggatgcgggtctcgccgaagtccttctccagccccagcgaatggcattccgggtgctcttcgagcgtcgcgacaagccgcgcggcgtgcgacaccaccagcacctgggagtgctgcgcggcctggccgaccaggcgcccgagggccggcagcaggtcgggatgcaggctggtttccggttcgttgagcaccagcagcgccggcggccgcggcgacaacagggcggcgatccacagcaggtagcgcagggtgccgtccgacagctccgcggtgcgcagcggccgcagcaggccgggctgctcgatcagcacttcgaagcgccctcccgggttgtcgatgtgcaggcggctgccgggaaaggcatcgtccaccgcctcgtccagcgccgccgcatcaccgatctcgcggatggtctgcagggccgcggccaggtcggcgccgtcggcgcccagcaccggcgtatgggtgccgatctgcggccgccgcgccggtgcctcggcgtcgctgcggaaatggtcgtagaagcgccaggagcggatccgctcgcgcaggccgagcagttccggcacctgtcgcgggtccaccgccgcgcccagcatgctgtcgaaggtggcgaggtgctgcgccgccacttcccagcgaccgccgccgccgcgtgcgcgcaacaacggcccgcgacggtcgacgaggacattggccgggcgcaggaacgggccggcccagatgcattcgcgcttgatcaccgggtcgagaccgaacttgctctggcttggctccggcaggccgaggtcgatgcaataaccgaaatcctccccggcgaagcccaggcgcaggttcaccgactgccggcgcacgctgccttcgatcggctgggcgccactgcgcatggcccggctgatgtcctccggtcccgcccacagggtcgatggcaggccgccctcgcgcgccagcgacgggatcacttcgccgcgcgcgctgtccgccagcaggcgcaaggcccggtagacgttggacttgccggcgccgttggcgccggtgatcaggttcaggcgccgcagcggcatcaccaggtcgcgcagggtgcggtagttggacaccgccagggtggtcagcatggctgctctcgaaggaacggaaacgcggccgattgtaggccaaatgccgcatcgcttacttgagcccggctaccccggcgacgatcaacccgacagaaaccagcttcaccgccgtcaggctctcgccaagcagcaggacgccgaggaacaccgtgcccagcgagccgatcgcggtccagatcggataggcgacgctgaccggcaactcgcgcagcgccagggtcaggaaatagatcccgccgatcgccgcgaccaccgtcagcagcgacggccagagtctgccgaagccgttggagaacttcatgcccatggcgaaggcgacctcgaaggccgccgccaccagcagatggaaccaggccatggcggctcctcaggccgaccgcgccagcgccagcaggcgctgttccgcctcggcgcaggagtcctcgaaggacctgccgccggattcctcgccttccgccgcgaccaccgtgacctcgtcgatgccgatgaaacccagcgcggtgcgcaaccagggatcggcgtggttcatcgcctggttctcgccgcccgggccgaagccatggccaccgcgactggtgacgatcagcgcacgcttgccacgcagcagcggccggtactgggcgacgccattgtcgaggacgaaatcgaaggtcaccccgaggcgcacgatctggtcgatccaggccttcaggccgctgggcacgctgaagttgtacatcggcgtggagatcaccagcaggtcgctgtcgaacagttcgccgaccagttggtcgctcagcgccaggtcggcctgcatcgccagcgaacgctgttccggctggggatggaaggcggcggcgacgaaggcctcggtgaccgccggaagcggtacccggccgacttcgcggcgcgccacgcgggcctgcggatgggcttcgcgataggccgccaggaaaacctcggcgagacgccgggactgcgagcgctcgcctcgcggactggcatgcactgcaagaattctactcatctgtatctccttggattcggctagactcgaatggcctcaaggcccttctcctggagccagaaattattggcagcgggggtttccgacaaatgagcaatagttgttcagggtgaattcagttcatccatggagattccaatgttcgcttccctgccgctgaccgcgttgcgcaccttcgaatcggcggcccgccagtcgagcttcaaggccgccgccgaggagcttgcggtaacgccaaccgcggtttcccaccagatccgttcgctggaagcctggctcggcgttccgctgttccagcgcctgccacggaaagtgcgcctgaccgactgcggcgaacggctgttccgcagcctgcacggggccctgctggaaatttcgcagagcgtcgacacgctgcgtccgcagcgcaacgtaggcaacctgacggtctccaccaccccggccttcgccgccctctggctggtgccgcgtctcggccgcttctacgccgcgcacccgcagatcaacctgcgcctggacaccaactgcgaagtcctcgacctgcaccaggacgccagcatcgacctggtgatccgctacagcctcgacgaccatccgaacttctacggtctctgcctgttcgacgaatgcttcgcggtctacggctcgccggcccaggtcgccctggccgcagaacggcagccgaccctgatcagcgtgcgctggcacaactccaggctctacgcccacggctgggaggcctggtgcgcgcaggccggcgaagactggatggagggccagccggtgatccgccagtacgacgaggagcactatgccctgcaggcggccatcgccggccagggactggtgctggccagttcgatcctggtttcggaaagcgtcgccagcggcctgctgcaaccctacagagcggatatcagtgtcgacggcgccggctacagcgcgctatgcgtgcccggacgggaacgtcatccgccggtgaaggcattcttcgaatggctgaggctggaggcacgacagtcggggcacgcttgccggctggagcgggacgcctgagcggcgcggcgggacagggacaacgcggctgccgttatccgtcctgcgcggccaggcgcagcagccgccggacaaaacgacggcccgcaccttgcggggcgggccgtctccatgcgcgggcgctttacccgcccgcaggctcgatcagcgctgggttaccggagcggcggaaccctggtgcgcctcgcggtactcctgctccgcatcgtcgaagcgcttgagcatgctcgtcgaaggcgccttgccgagcaggctgaagacgacgatggcgacgctggcgaagaggaagccggggatgatctcgtacaggccggtccagcccaacaggttcttccacaggatcaccgtcgccgcgccgacgatcatgccggccagcgcgccgttgcgggtcatccgcttccacagcagggagaacagcaccagcgggccgaaggcggcgccgaagccggcccaggcataggacaccaggccgagcacgcggttttccgggttggaggccagccagatggcgatcaccgccaccagcagcaccatggcgcgaccgacccagaccagttccagctggctggcgcccttgcgcaggaaggccttgtagaagtcctcggtgagcgccgaggagcagaccagcagctggcagctcagggtgctcatgaccgcggcgaggatggcggacagcaacacgccggcgatccacgggttgaacaggatcttggccagctcgatgaatacccgctcggggttctcgctgaccgcgccggcctgctccggatgcgcctggaagtaggcgatgccgaagaagcccacggccacggcgccaccgaggcagaggatcatccaggtcatggagatgcggcgcgcggccgggatcgatttcaccgagtcggcggccatgaagcgcgccaggatgtgcggctggccgaagtagcccaggccccaggccatcagcgagatcacgccgatgaaggaggcgcccttgagcatgtcgaagctggtcgcgtccttcagctcgatggcggtgaaggtcggctcgacgccgccggtggcgagcatcacgatcaccggggtgaggatcagcgcgaagatcatcagcgaggcctgcacggtgtcggtccagctcaccgcgaggaagccaccgatgaaggtgtaggcgatggtcgccgcggcgccggcccacagcgcggtctcgtaggagaggccgaaggtgctctcgaacaggcgcgcaccggcgacgatgccggaagcgcagtagatggtgaagaacaccaggatcaccagggccgagaagatccgcagcaggcggctgttgtcctcgaagcggttggtgaagtagtcgggcagggtcagcgcgttgccgttgtgctcggtctgcacccgcaggcggccggcgacgaacagccagttgaggtaggcgccgacgatcaggccgatggcgatccagctttcggacaggccggacaggtacaccgcgccgggcaggcccatcagcagccagccgctcatgtcggaggcgccggcggacagcgccgtgacgaagctgccgaggctgcggccaccgaggatgtagtcggagaagttgttggtggagcgatatgccgccaggccgatcaggaccatggccgcgatgtagatcacgaaggtgatcagcgtgggcgtattgacactcatagggactcccctattgcttgtttttatccgggcccttgcgtgtgcaagcaacgggtagcgggcccttggttggcagaatggcgcttgtggcgtcactccgtgagcgcttgccggagcaagccggaaacgtgggtggcctcaaacgagtccgaacaggcccacgcctcacgatccctcccctgtcgggcagggaaaatcgtcctttatggtccgttccgggcacgcaccggaacggcggtcatttcccttggcgttcgctgcggcgaaccccggaaaccgacccgggcgccaaggcgcccgggaacggagtatcactcggcgtcggccagcgacagcagcgacgcgttgccgcccaccgcggtggtgttcaccgacgtggtgcgctcgctgacgaaacgcagcaggtagttcggcccgccggccttgggaccggtgccggacagcccgtggccgccgaacggttgcacgcccaccaccgcgccgatctggttgcggttgatgtagaggttgccgacccgcgccagctcttcgatgcgacgggcggtttcctcgttgcggctatggacccccatggtcaggccgaaaccggtggcgttgatcgcctgcacgaccttttccaggtcctgcgcggcataacgcaccacgtgcagcaccgggccgaagttctctttcttcagctcgtcgatgccgctgatctcgaacgcgacgggagcgacgaagtgaccgttcaggttgcccggcaccttggtctcggcgatcagcttgccggcggccttcagcgcggcgatgtgctgctccaggccggccttggcctcggcgtcgatcaccgggccgacgtcgctgacgcgcacgtcggtcgggccgaccttcagctcggccatggcgcccttgagcaactcgatcacccgctcggcgatgtcctgctgcacgtacatcacgcgcagcgcggagcagcgctggccggcgctggtgaacgcggattgtaccgcatccttgatcacctgttccggcaaagcggtggaatcgacgatcatcgcgttctgcccgccggtctcggcgatcagggtggcgatggcgccgggcttctcggccagttggcggttgatgatgcgggcggtgtcggtggagccggtgaaggccaccccggcgacccgcgcgtcacggcagaacacgccgccgagagtggcgccgtcgcccggcagcagggcgataacgtccttcggcaggccggcttcgaacatcagttcgacggtgcgcgcggcgatcaggctggtctgctcggccggcttggccagcacagtgttgccggccaccagcgcggcgctgatctggccgaggaagatcgccagcgggaagttccacgggctgacgcaggcgaagatgccgcggccttcgtagaacagctcgttgcgctcgccggtcgggccacgcagttcctcgcggaccaggcgctggcgggcctgctgggcgtagtagcggcagaagtcgaccgcctcgcggatctcgtcgataccgtcctgcaacgacttgccggcttccagggtgcacagcgccatcagctcgccgcgctgggcttccagcaggtcggcgagacgctcgaggatgccggcacgctcgtccaccggggtggcgctccagcgcggccaggccgcctgcaacacgtcgagggccttgccggcctgctcggcggacgcgtactggacgctgccgaccagcctctccaggtcgtacgggcaacgcacttcgtgggccgggccggagagcttctcgccgttgacgatcggcgcggcttgccactggcgggtcaggtgcggcttgtaggcgagctccagctcgttccactggttctggatgttcatgttgatgccctgggagtttttccgcccggcgccgaagatcgcctggggcagagggatacggtcgttggccagcgtcttgaactggcgcagttgggtaaccgggtgctggatcagcgtctccaccggcacgcgcgggtccaccagcttgtgcacgaaggaagagttggcgccgttctccagcaggcgccggaccaggtacggcagcaggtccttgtgcgcgccgaccggggcgtagatgcgcacgttgcggcggtacttctcgatcaccgtgtcgtacagcgcgtcgcccatgccgtgcaggcgctggaactcgaagtcgcgctcctcgccgccggcggccctggcttcgtcggccagggcgaggatggcggtcacggtgtgggcgttgtggctggcgaactgcgggtagatcaccccgcgggtgtgctcgctgagcaggtagcgggcgcaggccaggtaggaagtgtcggtgccttccttgcgggtgtagacggggtagccatcggcgccctgcacctggcactgcttgatctcgctgtcccagtaggcacccttcaccaggcgcagcgggatgcgtgcgccaagctcgcggccgagcagggtcagccataccagcaccggcaggcagcgcttggagtaggcctggatgaccaggccgaactcgccccagccggcgatggccgggtcgcgcatcagcttctcgtagagttcgagggacagctccaggcgatcggcttcctcggcgtcgatggtgatgccgacgttcagcttgcgcgcgcgcaccgccagttccaggacgttggcgaacagctcgctgagcacccgctcgcgctgcgccacttcgtagcgcggatgcagcgccgagagcttgatcgagatcgacggccgcggccccggaccgacctgcggctcggcgccgacggtgtcgatggcctggcggtagtcggccatgtatttctcggcgtcggcggcggtcagcgcggcctcgccgagcatgtcgaaggaataggtgtagccctgctcgcggcatggacgaccgttcttcagcgcttcggagatggtccggccaagcacgaactgcttgcccatcagcttcatcgcctggttcatcgcggcgcggatcaccggttcgccggagcgctgcaccagccggctgatgacgctcggggcgcggccgtcggtgcgttcgtcgatgttcaccaccttgccggtcatcaccaggccccaggcggcgaaattgaccagaacgttgtcgctctggccgagatggcgctgccagtcggcggcggacagcttgtcgcggatcagcgcgtcggcggtcgccgcgtcaggcacacgcaacagcgcctcggccagacacatcagcatcaggccttcctgggtgtccaggctgtattggcgcaggagtgcgtcgagggtatcgacggcgttgtcccggctgcgcacggtttcgatcagtgcgcgggcgttgcggcggatagcctcgatgccgtcgggaccggggtcggcgagctgcagcagttcgcccaggtaggcttcctcgtcgaccgcgtagttggcgctgatgacagggaagaattcggctgcggaccgggtctggtcctcgccctgcaagacgtgactggctttgaacatcacgccctcctcttgtggagccattgttattgaaagaagtccggccaggcgtccattgcccggggcaccgccgccggcgggttgtgccggcggcgcggcacgtcctgtggcgcgggaatacggaccagtatgggtcaggcccattccgccggcgcgaggcaccagcggatagcggaatgtagtggctgcgagaggggcgattcttgcgaaagactctggagtttttgcggaaaactcctggctgcggaactttcccgttcctcttcgccggcaggcatgcggacattgccgctgcacgtcggcacgacgccatgcagagtggctacgcgggtctaccgacacaaaaagaaataatataacatcccaataaatacgccgatccgaccccgtcgcccttcctccgggaagggcctgggttcgctttggcctgaaaaaagtccgacccatgaccatggagcccgcaatgtcctcttccggccttttcccttcccgtccgctctggcctctcacgccactggcgctggcctgcctgattgtttcgggggaaacgctcggcgccgacggccgccccagcgaattgccctcccaggtgatcaccgccaacccgctgggcaacgaatctcccgccacgcccagcagcgtgctcgaaggcgacgagctgaccctgcgacagaaaggcagcctcggcgaaaccctcaacggcctgcccggggtgtcctccacctacttcggaccgggcgccagccgaccggtgatccgcggcatggacggtgatcgcatccgcctgctgcgcaacggcgtcggtgcgctcgacgcctcgtcgctgtcctacgaccacgcggtgccggaagaccccaacagcgtcgagcgcctggaagtggtacgcggcccggccgccctgctctacggcggcaatgccatcggcggggtggtgaacagcttcgacaaccgcatccccagcgaacccgtcgacggcatccacggcagcggcgaactgcgctacggcggcgccgacaccacccgtagccgctccggcgcactggaggccggcgacggcaacttcgccctgcacgtggacgccgccagccgcgagttcaacgacgtcaggattcccggctacgcccattccagccgccagcggcagatcgacggcgacaccggcaagcatcgggtgcagaacagcgacggccgccaggacggcggcgccgtcggtggctcctatcactgggagcacggttacgccggcctctcctacagcggctacgacagcaactatggctcgccggccgaggacgacgtgcgcctgaagatgcagcaggaccgctacgccttcgcctccgagatccgcgacctcgaaggcccgttcacctcgctgaagctggacgccgcctataccaagtacgagcacaaggaaatcgaggacggcgagaccggcaccaccttcaagaacgaaggctacgaaggccgcatcgaggcccgccaccgcccgctcggcccgctgaacggggtggtcggcgcgcagttcgccaacagccgcttctccgccctcggcgaggaagccttcgtgccgcacacggaaaccgacagcgccgcgctgttcgccctggaggaatggaagctcagcgaccgcctcgacctcagcttcggcgcccgcctggagcacacccgcgtggaccccgacgccaagggcaacgagcgcttcgccgagaacgacggttcacagagcttcaccaccggcagcctgtccaccggcgcggtgtacaagctgacgccgatctggtcgctggccgccaccctcagctacaccgagcgcgccccaaccttctacgagctgtacgccaacggtccgcacgccgccaccggcacctacgaggtaggcgatgccgacgcggacaaggaaaaggcggtctccaccgacctcgccctgcgcttcgacaacggcgtgcacaagggcagcgtcggggtgttctacagccgcttctccaactacatcggcctgctcgccagcggtcgccatcgcaacgaggaaggcgaagtggtcgccgccggcgatgacgaggcgctgccggaatacctctacagcggcgttcgcgcggacttctacggcgtcgaggcgcaggaccgcatccacctgctggaaagcccgtacggcaacttcgacctggaactctccggggactacacccgcgccaagaacaaggacaccggcgaaccgctgccacgcatcgccccgctgcgcctgaacaccgcgctgatctgggagttgcagcagtggcaggcgcgggtcgatgtcgaacacgccgcctcgcagcaccgcgtgccggaggaagaactctccaccgacggctacaccaccctcggcgccagcctcggctacaacttcgacctcggcgagagccgctggctggccttcgtcaagggcaccaatctgaccaaccagaccgtgcgctacgccagttcgatcctgcgcgaccgggtgccggcggcgggacgcggcatcgaggcgggggtgaaggtggcgttctgagacaggccgtgcgggacgaattcgctcggcggatgacgtccgcgccgttatccgtcctacaccactcccggtagggcgaataaccgcctgcggttatccgccgaaggtggcggatggcgctcagcccttgcgcagcgacttcggcgtcagccccaggtagcggcgcatcgccgtggtcagcgcgctctggctggagaagccgcattcctcggcgatccgcaccagaggcaggcggctttcccgcagcaaccgcgcggcgcagtcgaggcggaccttgagcaggtactggtgcggggtcaggccgacgctgtccttgaactgcgcgtggaaatggctcgggctgagacaggcgacctgggccagttcggcgaccgtgatgcgccgcgccaggttccgcacgatatgcgcgtccaggcgctccaggtcgagcggcccgctggccgccaggggctgctgctcgccgaacaggcgcaggtgcagggcgcggatcagcactccgccgagggcacgggtcagcagcgggtcgctgccgtagcgggccagttcggcgccggcgtagctgagcaggttctggaagtcggcgtccagggtcgggtagcgcggcgcctcgaacaggcgcgcgagcaggtcggggtcttccggggtcgggttgtcctcgcccaggtcgatgatcagcatgcggttgtcgcccaccccggcgaacacgtggcccgcctcgcccggcaccaggcaggcgcgcatccggcagacttccccgccacagccgttgacctcgaattcggcgcgcccggccagcgacatcaccagttggtgatgctcgtgggcgtgggtatgcgactggtcgggcagacggatgaggcgggtgtcgaacatgaacggcaactgctcaatttttgcgcactctactcgacttgcccgacgctgcccagcaccttgccgcaagtggtacccgcgtaccgcgtgctgcgtggaaaccttcggcaacatccttgaacggacagggattgaaacccgcccccggggccccatctagactctcatgtttcagtcagtcaggtgcctcatgagcgaccaggacgttaatcccgaacacatcagcgacgcgcagcccgccggcaccggcctggtgctgcccggccagaccctgccgaccaccctctacgtgatcccgatccacaaccgcccgttcttcccggcgcaggtgctgccggtgatcgtcaacgaagaaccctgggcggaaaccctcgaactggtggccaagaccgaccaccattcgctggccctgttcttcatggacaatcctccggaagacccgcgccacttcgacgtcaacagcctgcccgagcacggcacgctggtccgggtgcaccatgcctcgcgcgagggcggcaagctgcagttcgtcgcccagggcctgtcgcgggtgcgtatccggggctggatcaagcgccatcgtccgccgttcatggtggaggtggactatccgaagaccccgatcgatcccagtgacgaagtgaaggcctacggcatggccctgatcaacgcgatcaaggagctgctgccgctcaatccgctgtacagcgaggaactgaagaactacctgaaccgcttcagtcccaacgacccgtcgccactcaccgacttcgccgcggccctgaccaccgcgcccggcggcgaactgcaggaagtgctggacaccgtgccgatcctcaagcggatggagaaggtcttgccgctgctgcgcaaggaggtggaagtcgcgcgcctgcagaaggaactgtccgccgaggtcaaccgcaagatcggcgaacaccagcgcgaattcttcctcaaggaacagttgaagatcatccagcaggagctgggcatcaccaaggacgacaagagcgccgacgccgacgaattccgcgcccgcctggaaggcaaggtgctgcccgagcaggcgcgcaagcgtatcgacgaagagctgaacaagctgtcgatcctcgagagcggctcgcccgagtacgccgtcacccgcaactacctggactgggccaccgccctgccctggggcgtgtacggcaaggacaagctcgacctcaagcatgcgcgcaaggtcctcgacaagcatcacgcgggcctcgacgacatcaaggatcgcatcctcgagttcctcgccgtgggtagtttcaagggcgagatcgccggctccatcgtgctcctggtcggcccgccgggagtgggcaagaccagcatcggcaaatccatcgccgagagcctcggccggccgttctaccgtttcagcgtcggcggcatgcgcgacgaggcggagatcaagggccaccgccgcacctacatcggcgccctgcccggcaagctggtgcaggcgttgaaggaagtcgaggtgatgaacccggtgatcatgctcgacgagatcgacaagctcggcgccagctaccagggcgacccggcctcggcgctgctggaaaccctcgacccggagcagaacgtcgaattcctcgaccactacctggacctgcgcctggacctgtccaaggtgctgttcgtctgcaccgccaacaccctcgactcgatccccggaccgctcctcgaccggatggaagtgatccgcctgtccggctacatctccgaggaaaaactggccatcgccaagcgccacctgtggcccaagcagttggaaaaggccggcgtacccaagggccgcctgagcatcagcgatgccgcgctgcgcgcggtgatcgagggctatgcgcgggaagccggggtgcgccagttggagaaacagctcggcaagctggtgcgcaagtcggtggtcaaactgctggaggatcccgagtcgaaggtgaagatcggtcccagggacctcgaggactacctcggcatgccggtgttccgtagcgagcaggtgctttccgggatcggcgtgatcaccgggctggcctggaccagcatgggcggcgccaccctgccgatcgaggcgacccgcatccacacgctgaaccgtggcttcaagctcaccggccagctcggcgacgtgatgaaggaatccgccgagatcgcctatagctacatcggctcgcacctgaagaagtatggcggcgacccgaccttcttcgaccaggcgttcgtccacctgcacgtgccggaaggtgccacgcccaaggacggtcccagcgccggcgtcaccatggccagcgccctgctctccctggcgcgcaaccaggtgccgaagaaaggcgtggcgatgaccggcgaactgaccctgaccggccaggtcctgcccatcggcggggtccgcgagaaggtgatcgccgcgcgccggcagaagatcttcgagctgatcctgccggaagccaaccgcggccacttcgaagagttgcccgactatctcagggaagggctgaccgtgcatttcgccaagcgctacggcgacgtggccaaggtgctgttcccggcctgagccggcggcggatggccgaccggttcggccgtccgccgcgccaaccttggcactcgggcgccagcaaggtttatgctggcgccctttccattcgagccgaggagcgctgcatgtccttttccccctcccgtctgctgctgccattgtccatcgtggtcctggccggctgcgccgggcaacagaagccggtggtcaccctggaagacgccgacgactgttcgccgctgaagctgacgcaaggccaggaactggtgctgaccctgccgagcaatcccaccaccggcttccgctgggaactgcgcaaccctgctgccagcgtgctcaagcgccttggcccggaggtctacagcaattccgaagaagacagcggcctggttggcagcggcggcgaatcgacctggcgcttccgcgtcgccgccagcggcgacgaccgcctggaactggtctaccggcggccctgggaaaaggacgcggaaccggcggaaagcttttcctgcacgatccaggtgcgctgaaaccgctgcccgcggcggacacattctgtacgaagaccgacgtcctgcgccgtggcgacctggcctatcctgacaggccccgtcgccctgaggactccatgctccgcgcctccttcgtcctgctcgccctgtcctgcgccgctcctctgctctcgctggccgaaccgttgcgcttcgcaggcgacgacggctgcccctacctgtgccctggcacgccgcagcggcccggctacctggtcgaggcgctcagccaggtccttcgggagccaccgcacttcgacagcctgccctggccgcgcgccgtgcagatggtccgcgacggccatcgcgacggcctggtcggcgcctatggactcgacggcctgcgggtcggcagcgagcccatcggctgggtcgggctggccttctatacccgccacgacagcgactggcactactccggcgatgcatccctgctcggccagcgcctgggcctcgcccagggctacgtgaacaatccgcgcttcgaagcctggcgcagccaggccggcgacgacgacctgcacctgcaggtcctcggcggcgagcgcgtgctgccgcgcaacctgcagaaactgctgctcggccgcatcgacgtgctattggaagaccgcgacatcatcgagcactacctggagcatcatccgcagctcgccggacagatccgccgcgccggcgaactacccgggcggcagccgctgcacgtcggcctcagcccgcacctgccggaggtcgacgcgcgtctcgcggaactcgacgaagggctacgccaactgcgtcgcgaaggcaccctgaaggtcctcggcgagcgctataggctttctttcgaatgactttccgggccgccggaaatccgccgccagaccagcaaccacgctgctttcagccgattgaataaattccggcaggcctttttggcgtcgtctattactcaatctacgacggcaccgaaaggaggcgcgtcatgggcaccgctcttcgttactcactgctctgggcatccactgtcttcgtttcctcctgcggcagcctgctgcccagcgaacgagcggaagtccaatcccccttcgtcgactacctcgatgccgaactgcgctattcccaggcgcaacccggcagcacgacccgttcgcagctgttcgggctgggtttcgatccattgacccagggcaacggccgcatgctgtcgttcatcgacgtgcggctcatgttcatccagccgaacatccccatcgattacctgccgggcggcctggtgcaatgcctggaagcgaaggaccgttgcatcggctacgccttcgatttcagcaagaccgacacccagcgggtcggcagcttctgggcggacgtgttcaacttccgcaagaaacgggagttgcagggctggtcgttcaaggcggtgttcgtcttcgtcaacgacgtgctggtgcacaaggtcagcaacggcgaaccgaacatccatcgcctggaagacaagaagaacccgctgggtccgctgcagggcgcgggagagtacttctccgacaagctcaggtgattcgcctgcgcgcatgggtgaatcgtcgccgcgcagttgggcgacgctcatccctcggctacaattcggccccctgaaaagccgtgatgcccgaggtcacccgcgtgagcgagtccgatcgcctgttcgcccaaccccagcaacgtgtcgccgacttcgtgttcaacgaagacgtggtgcgcgtgttccccgacatgatcaagcgctccgtgccgggctaccccaccatcgtcgagaacatcggcgtactcggcgcgcagttcgcccagccgaacagcgtgctctacgacctcggctgctcgctcggcgcggtcacccagtcgctgcgccgccacgtccgcaacgacggctgccgggtgatcggggtggacaactcgcacgcgatgatcgagcgctgcagtgaatacctgcatgcccaggacgccatgtaccaggagctgctgccggtcgagctgatcgaggccgacattctcgccctggacctgcaacccacctcgctggtggcgatgaacttcaccctgcagttcgtcgcccccgaccagcgcctcggcctgctgcgcaggatccgccaggcactgctgcccggcggcgcgctgatcctctcggagaaactgcgcttcgccgatgcgcaggagcacgcgctgctcaccgacctgcacatcgccttcaagcgtgccaacggctacagcgagctggagatcgcgcagaagcgcagcgcgctggaaaacgtcatgctccccgacaccttcgaggaacaccgtgaacggctgctggccgccggcttcagccgggtcagccaatggttccagtgtctcaacttcgcatcgatgatcgccctgccatgatccagcacctcgccctcgacgccctccagcgacacctcgccggctctccgctgtacggctgggcgaccagcctgcccgcgcagatcgccgcgcgcatcgaggaaggccacggcgacctggcccgttggtggagcgcggtccagcgcctgccccaggtgcccgcaccgaaggtcgaactggcccagcgcttcgccctgcacagcgaccacgatgcggcgctgcaagcgcaggtgaaggaagcgctgcaagggctgattccctggcgcaaggggccgttcgacttcttcggcgtacaggtcgataccgaatggcgttccgactggaaatgggagcgtgtctcgccacatgtcgaactgcgtggcaaacgcgtcctcgacgtcggctgcggcaacggctactaccagtggcgcatgctcggcgccggcgcggaaagcgtggtcggggtcgatccgaactggctgttcctctgccagttcctcgccgccaagcgctacctgccggagctgccggcctggcacctgccgctggccctggaagacctgccggagaagctcgaaggcttcgacacggtattctccatgggcgtgctctatcaccgtcgctcgcccatcgaccacctgctggcgctcaaggactgcctgaagcgcggcggcgaactggtcctggagaccctggtggtggaaggcgacgccagcaccgtgctggtgcccgaggaccgctacgcgcagatgcgcaacgtctggttcctgccctcggtggcagccctggagctctggctgcgccgcgccgggttcgccgacgcgcgctgcgtcgacgtcagcctgaccagcgtcgaggaacaacgctccaccgaatggatgcgtttccagtcgctgccggaattcctcgatccgcaggaccgttcgcgaaccgtcgaaggcctgccggcaccgatgcgcgccacgctggtggcgtgcaagccctgacagcgaatagggaaaagcccatcctcggatgggtttttttttgctttcatccgccccgcaggtcgacggcaagcggggcgcgattgcctcagcgcttggtcgccgcggccagcatcagcgctttcatctcggccaccgcctgcctgaagccgacgaagagggcgtgggcgacgatggcgtggccgatgttcagctcgttgatgccgtcgatggccgcgaccggctcgacattgtggtagtgcaggccatgcccggcgttgacgatcaggccgagggaacgcccgagggccacgccctcgcgtacccgctgcagctcgcgggcctgctcctcggggtcttcggcgtcggcgtagcgaccggtatgcagttcgatagccggcgcgccgacccgggcggaggcctcgatctgccgcggatcgggatcgatgaacagcgacacttcgctgcccaccgcagccaggcgtcgcaccgcgtcgcggatgcgctgttcctggccggcgacgtcgaggccgccctcggtggtcagttcctcgcggcgctcggggaccaggcagctatgcgccggccggatctcctcggcgaaggcgagcatttcctcggtgacccccatctcgaagttcatccgcgtttgcagcacttccttgagcacccgcacgtcgcgttcctggatatgccggcggtcctcgcgcaggtgcacggtgataccgtcggcgccggcttcctcggcgtccagggcggccttcaccgggtccggatagcgggtgccccgggcctggcgcagggtggcgacgtgatcgatgttcacgccgagcagaattcgagtggcttcagtcacggggtgactccttacggttcatgaacagctcgcggctgaccagcggccggccgcccagatggggagcgagcgcctggcgcatcaggcgcttggccgccgccagggcgccgggggcgctccagtcggcgtcggccatggataacagttcggagccctggaacagcccgggttgcagttgcgccaccggctccaggccggcctctggcaaaagctggtacaacgcctgcggctcgatcgggcgcccatcgatgtcgacatcgagagcgaaaccatagcccagttgctccagcaggcgccattcgaacgcgcgcagcagcggttcgatgggtcgccccgccgccagcagcggcagggtcgcggcgtagtgggcgaagatttccggctgcgggtcttccgccggcaacaggcggatcaacagctcgttgagatagagaccgctgaacagcgcctggccattgagcaggttgggaatgccggcgctttccaggcgggccacggtcttcagttcgccgcgcccgcgccactccgcttccagcggcacgaatggccgcgccagggcgccggccttgccgcgggcgccgcgcaggaccgcgcgcaggcgacccagcggggtgaagaagtccaccagggcgctggtttccttgtacggccggctatgcagcacgtaggtggcttgggcggcggcgaaggacatggcgggtcgaccgggcgcgagagggatggcgcccggctggcgccgggctgccgggaacggtcagaggtcgccgtagcccagcgagcgcagggcgcgctcgtcgtcggaccagccgcccttgaccttgacccagaggttgagcatgaccttggagtcgaacagcacttccatgtccttgcgcgcgttctggccgatgcttttgatccgctcgcccttgtcgccgatgatgatcttcttctgcccctcgcgctccaccaggatcagcgcatggatatgcaggatgcgaccttcctgcttgaactcctcgatctccacggtgatctggtagggcagctcggcgccgagctggcgcatgatcttctcgcggaccagctcggcggccaggaagcggctgctgcggtcggtgatctggtcttcggggaagaagtgctcgctttccggcagacgctcggcgaccagcttctccagcacgtccaggttggtcccgtgctgcgccgagatcggtactatctcggccttcggcaactgctgggtgagccattcgaggtgcggcagcaggtcggccttctcctcgatgcggtcggtcttgttcaccgcgatcagcaccgggcaactgacgtactgcacgcgctccaggaccatctggtcctcttcggtccagcgggtgcggtcgaccacgaagatcaccacgtcgacatccttcaatgccgcgctggcggtacggttcatgtagcggttgagggccttctcgccgctcttgtgcaggccgggcgtatcgacgtagacggcctgcacctcgccctcggtcttgatcccgagcatgttgtggcgggtggtctgcggcttgcgcgaggtgatcgccagcttctgcccgaggatgtggttgagcagggtggacttgcccacattggggcgccccacgatcgccacgtagccgcaacggctgccggcggggatgtcgtcgtgcatgtcagtcatggccattctccacgcccagggccaccagcgcggcggccgcggccacctgctcggcgatgcggcggctgccgccgtgcccgtgggtcttgtcgctcagcagggccacttcgcaatcgacgaagaaggtccggcaatggggttcgccctggatatccaccacctcgtagcgcggcaggtcgcagccacgcgactgcaggaactcctgcaggcgggtcttggggtccttgttggtgtccaccggggtcagctcgcgcagttgcggtccgagccaggcgatgatccgctcgcgcgcggagtccatgccggtatccaggtagatggcgccgatcagggcttccatcgcatcggcgaggatcgactcgcggcggaacccgccgctcttcagctcgcccgagcccagccgcaggtagtcgcccacctcgaagccgcgcgccagcagggccagggtctcgcccttgaccaatcgcgcgcgcaggcgcgaaagctggccttcgcgagcctgcgggaagtggtggaacagcgcctcgccgatgacgaagttgagaatggcgtcaccgaggaactccaggcgctcgttgttgcgcccggcgtagctgcgatgggtcagggccaggaccatcaggtcccggtctttgaaggtatagccgagcttgcgctcgagtcggtccagcgaattactcacggcatgcgtacacggaattctttgtcgaagtggaccaccaggtcgatgttgctgatcagtggctcgcgtttttcatatttcaggtgcgcccggaattggttgtcttccagttgcacctccagggccttctccaggtccaggttgcggatgccgttgatctgcatccccttgccgacgtagctgtagaactccggcacggaacgcacctcggccgccttgtcggtctccacggaagtgatcaccttctccagcgagtagtaatccatgtagtgcgggatgatcttgaatgcggcgctggcgaagaacgccaccacgcccagcaccaccagccaccccagcagggacatccccttctgcgaacgcgcgaacctcatgtcggacctcatgtcagtgtagttattccgtccagcgagcggtaacgccatcgggcagggccctgcggcggcgttcgcggaagtgaaagcggggctgccctcgggagcagccccgcttcgcgattattcagcaggagcgcccttccgcgtggcgaacctgcgcacaggtcagtgaatcacgccgacccgggagaagttcggcaggttgctcatcttcggatcgggccagctcatccatacagcgaaggccttgccgacgatattgcggtccggaaccatgcccagcagatccttggggatcttcggatcgttccagtagcggctgtcgttggagttgtcgcggttgtcgcccatcatgaagtagtggccggcgggaatggtccactggcggtcgggctcaatgcgatagcggctcatttccttgcggatcaggtgctcggcctggcccagcttctcctggtacagggtcacgctgcccagggtgcccggttcctcgccgaccagtttctccgccaccagctcgccgttgacgtacaggcgcttttccttggtgtagcgcacggtgtcgccgggcaggccgaccacgcgcttgatgtagttgatgttcggttcgctgggatagcggaacaccatgacatcgccgcgctgcgggtcgccgatcgggatcaccttggtgtccagcaccggcaggcggataccgtaggcgaacttgttgaccaggatgaaatcgccgacctcgagggtaggtttcatcgaccccgagggaatctggaacggctcgaccaggaaggaacgcagcaccagcacgatgaacagcaccgggaagaacgacttgccgtactccaccagcagcggttccttgttgagcttctccagcactgccggatcgggctcgttcacctgcccttcgtaggaagagatcgcggcccgccgacgcggcgcgaacagcaccaggtcgaccagggccagggcgccgcatacagccacggcgatgaccagcaacaacgggaaattgagtgtcatgggttctagctatccactttgagcacggcgaggaaggcttcctggggaatttccacgctaccgacctgcttcatccttttcttaccagccttctgcttctccagcagcttgcgtttacggctcacgtcgccaccgtaacacttggccagcacgttcttcctgagcgccttgaccgtcgagcgggcgatgatctgcccaccgatggctgcctggatcgccacgtcgaacatctgccgcgggatcagttccttcattttctccaccagctggcggcccttgtagggggcgttgtcgcggtggacgatcagggcgagggcgtcgaccttctcgccattgatcagcacgtcgagacgaaccaggttggacggctcgaaacgatcgaagctgtagtccagggaagcatagccgcggctggtggacttgaggcgatcgaagaagtcgagcaccacctcgttcatcggcaggtcgtagaccacctgcacctggccgctgaggaagtgcatgtcgcgctgcacgccgcgcttctcgatgcacagggtgatcacgttgcccaggtggtccttgggcaccaggatggtggcgcggcagatcggttcgcgcatttcctggatcgacgccaggtccgggagcttggacgggttgtcgacgtagatgatctcgccattcttctgcacaatctcgaagaccaccgtgggcgcggtggtgatcaggtccaggtcgtattcgcgctccaggcgctcctggatgatctccatgtgcagcatgccgaggaagccgcaacggaagccgaagcccagggcttcggagctttccggctcgtattgcagcgacgagtcgttgagggtcagtttctgcagggcgtcgcggaagtcctcgaaatcgtccgagctgaccgggaacaggcccgcgtagacctgcggcttgacccgcttgaagcccggcaggacctcgacgtccggcgtgttgttcagggtcagcgtatcgcccaccggcgcgccgtggatatccttgataccggcgatgatgaagcccacctcgcccgccttcaggtcgacggtctcggtgtgcttcggagtgaataccccgacgctgtccacctggtggaccttgccggtggacttcaccaggatcttgtcgcccttcttcacccggccgttcttcacccgtaccagcgagaccacgccgaggtagttgtcgaaccaggagtcgatgatcagcgcctgcagcggcgcctcgatctcgccttccggggcggggatggcggtcaccaggcgctccagcacctccagcacgcccatcccgctcttggcgctgcaggccacggcgtcggtggcgtcgatgccgatgatgctctcgatttcctctttcacccgctccggctcggcctggggcaggtccatcttgttcagcacgggcatcacttccagcccctgctcgatggcggtgtagcagttggcgacggactgcgcctcgacgccctggccggcgtccactaccagcagcgcgccctcgcaggcggccagcgagcggctgacttcgtaggtgaagtcgacgtggccgggggtatcgatgaagttgagctggtaggtcttaccgtcctgcgccttgtagtgcagggtcacgctgtgggccttgatggtgatcccgcgctcgcgctccaggtccatggagtccaggacctgggcctccatttcgcgatcggagaggccgccgcacatctggatgaagcgatcggccagcgtcgacttgccatggtcgatatgggcaatgatggagaaattgcggatatggctcaggtcgctcacggctcaacacactcgaaaagggcaagggcggcaatccgccgaaaaatagccggggagtttacctgatgctcgggcaaggcgtcacgcaggtaacggattgacgggcatgaaaaagggcggtggaaaccgcccttttttcgccagccggcttattcggccagcttgaaggtaatgaagctggcgcgtccctggcgcagcacccgcatcgaaaccgaacggttcttcggcagggccttggccacgtcggcgaagaccttggtcgaggtcaccgccttgttgtccaggtgggtgatgacatcgcccggacgcaggccgatgaccgcggccggaccgtcctggacttccttgatcaccacgccgccctggatatccaggctcttgcgctgctcggcggtcaggtcggcgacggtcacgcccaggcggttgctgctgcgctcggcgcccggagcgcccatcgaggcgatttcctcgtcgtcgtccggaaggctgcctaccgccatgctcagggacttgcgctggccgttgcggatcacgtccaggttgatcttgtcgcccggcttcatgttgcccaccaggtgcggcaggtcggcggactcgttgatcgactggccgttcaggctgaggatcacatcgcccacctgcaggccgcccttggccgccggaccgtcttccaccagctgcgccaccagcgcgccggacggcttgtcgaggccgaaggactcggcgagatccttgttcacttcctggatcaccacacccagccagccgcggctgaccttgccggctttcttcaactggtcggcgacgttcagcgcgacatcgatcggaatggcgaaggacaggcccatgaagccgccggaacgggtgaagatctgcgagttgatgccgaccacttcgccctgcaggttcagcagcggaccgccggagttacccgggttgatcgccacgtcggtctggatgaagggtacgtagctctcgttcggcaggctacgccccttggcactgacgataccggcggtgaccgagtgatcgaagccgaacggcgaaccgatggccaggacccattcgcccactttcagcttgttcgaatcgcccagtttcagggtcggcaggttcttcgcctcgatcttcagcaccgccacgtcgctgcgcgggtccgcgccgatcaacttggccttgtgctcgctacggtcggacaggcgcaccaggatctcgtcggcatcggccacgacgtgattgttggtgaggatgtagccgtcgttggagatgatgaagccggaacccagcgattgcgcctcgcgctgctggccgcgcggattgcgcggaacctgcgggatgctgcgctcgaggaagtcgcggaacatcggcggcagcccttcgaggtcggggatcgacagctgcccgcgcgccatggcgcgatccggcagcttctgccgcgtactgatattcaccaccgccggcgacgcctgttcgaccaaaggcgtgaagtccggcagttctgcccgggccgtcatcgccaggctcaaggccagcaaggccaccatcgcagccatacagcgttttagggtatgcatcgactacagctcccgtgatgttcgagggaagagaaagactcaggccgaatcggacggcccggaaatcagcgctcgcagaaccaccggctgcgaggctggatcatcggcatgacgacgagcatgccgacgcaccaatagccaggccgccagcaaacccgccagcccggacacgatgatcagaggttcgacaaggcccgcccgggtcgccagcaatgctgccacgaaaaacccgagcagagggaaaagatagaagaggacggaggcgcgcaacaacaggtcttcatgaattcctaggacgaccgcatcgccgacccgcaggctcaggtcgctcaacgcgcgcacccgggcacgccccgcgccgacgcccaggcgctgcatcagcccctggccgcaaccggcattggccgagcaggacgagcaggtactgcggcgcacggtctcgacccataccgctcccggctcggtcgccaccactcgcccctgctcctcgatcatttctgggcggcggcctcgggccggatggacagcgccacccgctcggcggtgcccagcggcacttcgccgacgacggtcaccatctggccgccgtcatcggtctgcaggcgcttggaaaccaccacggtcgggccgagctggctgcgcgcgtcgccaaccatggcaccgtgcagcggctcgatgaacaccgagaatcgtgccaggccatcgccataggtcaggcaggcgaccggatcgggggtgaccggactgcgacgcatgaaactgcgggtcagggtgaaacctggcggcagccattccgagcgccaggccacggtcttctcgccgtcggccttggccgggccgacgacctggcattcggcgcccgcctgcaactggtcttcggcaggtgccgcgccggtattcaactgggtgaactggaagcgctcgagcaactgccccttctcgttcagcagcagcgacttcaacggcaggccggtgtcgcggtccaggtgcagctcgaagccgtagcgatgctggtcgcgcggagtcaccgcaaggaccactgccgggcggccggcgacacgggattcgccgaccaggcgcaggtcgtaccaggaagccagctgggagggatcgaacttgcgcaccggccacagctgggcatcggccagttggtcggcaaggccgccgctgatgcactgggtgcgcccgtcgacccggaccacttcctggcgcgcgccgtcgagctggagcaggcgctcgcgaaccacaccatcgctctccacgcgatgccagatctcatgggtggagaagctgccattgcgctcgtagacgaaggtgccttggaaactgttctggcgatcggcctcggcgagacgattcagccagtcggaagcgtcggcagcctgagtggcgggaaccgccatcaggctgccaagcaaaagcaacagggaggtggtgcgcatgtctctcctcagcggttttccaggctggctgcccgagcgtagggcagcgcgctctctgtaccactgacggcggattgttgcacgtgctgacgcaggtagatcggcagacgctgctcatgccagcgggtatcgctggacgaggagttggtgatcacctgcggcgccccctgctcttcgctgtagccggccagcacggccgggcctttcacctgaggcagggcgatctgcggggtggtcccctgttacgccatctgcggcagggcgtcgttctggttgtacagacgcacgccggccagcaccgccagggtcaccgaggcagcgaccgccaggcgaccgaccatccgccacggtcccttctccgctttcggcggagcggcctcgtcggccagggcagcagagaccgccgcagcgatatccagcttcggcagggtaggctcgcggtgcatgacggaccgcgccaactggtaacgcgaccaggtggaacgcagctcggcatcctcgccgcaagctgcgagcacccgccgcaactcgagttcatccgcttcgttatccatcacagcggacagagtttcctgcagggcttcacgactcatagcgatacctctcttggcatttgccgctgtgtcaggcttctcgcaacaaaggctgcagagctttgtcgattgcttcacgagcgcggaagatccgcgaccgtaccgtccccaccggacactgcatcacggtggcgatatcttcgtaactcaaaccttcgaactcgcgcagggtcagggccgtgcgcaaatcctcgggcaactgctggatggtctggtgcacggtggcctcgatctcatcccgcaacatcgcccgttccggcgactcgatgtccttcagggcgtggtcgccctcgaagaactccgcatcctctgcggtcacatcgctgtccggtggccgacgcccgcgagcgaccaggtggttcttcgcggtgttgatggcgatccgatacagccaggtataaaaagcactatcgccgcggaaattgcctagcgcacggtatgccttgatgaaggcttcctgcgctacgtcctgggcttcctgggcgtcgtgggcgtcgtgggcgtcgtgcacgaaccgcacgatcaatcccagtatcttgtgctggtatttcagtaccagcagatcgaaagcccgcttgtctccgcgctgtacccgttcaaccagttgctgatcctgttcctgggttagcatgaaagctcctcttcgaacctggaggagcttcgagcgtcccagcgaatcgtcttgccaagatagactcgggcttcttgcaaaagttctcccctccaagcatgcgtcacgagttttttcctcgctcgtgacgtgcggccccggacatcgtgtccgggccccgcgaaaatggattgcatcgggctcagggcccggcctctgtgccgctgggtaggccaaccggacgaggtcttcaggcatcctgctttggaaccgatgcgtctaagaaagttccagcactacatcgccccgctctgatgacgcctgccgatgacaggcccgcagctcatccgccggaccggcagcgggggtgcgctattgtgccgccaggcccttctatatactagggctccaccacggggaaatgcgggcatgagccaacattatcaacacgatgtactggtcatcggcagcggcgccgccggcctgagtctggccttgacccttccggaacacctgcgcatcgccgtcctcagcaagggcgaactgtcgcagggctcgacctactgggcccagggcggcgtggccgccgtgctggacgataccgacaccgtggaatcccacgtcgaggacaccctggtcgccggtggcggcctgtgccgcgaggatgcggtgcgcttcaccgtggagcatagccgcgaagcgatccagtggctgatcgaacagggggtgcccttcacccgcgacgagcagcacaaccacgaggaaggcagcttcgaataccacctgacccgcgaaggcgggcacagccaccggcgcatcatccatgccgccgacgccaccggcgccgcgatcttcaataccttgctggcccaggcccggcggcgaccgaacatcgagctgctgtcgcagcgggtggcggtcgacctgatcaccgagcgcaagctaggcctgccgagcaagcgctgcctgggcgcctacgtgctgaatcgggaaagcggcgaagtcgataccttccgtgcccgcttcagcgtgctggcctccggtggcgcgagcaaggtctacctttataccagcaatcccgacggcaactccggcgacggcatcgccatggcctggcgcgccggctgccgggtcggcaacctggagttcaaccagttccacccgacctgcctgtaccacccgcaggccaagagtttcctcatcaccgaggcattgcgcggcgaaggcgccctgctccgcctgcccaatggcgagcgtttcatgccgcgcttcgacccgcgtggcgagctggcgccccgagacatcgtgg
